United States Patent Application Publication US 2026/0191916 A1 - sequence listing, part 16

SEQ ID NO: 17 - DNA, 2644468 bp, Akkermansia muciniphila (residues 1-1,322,234 of 2,644,468)
  source 1..2644468: mol_type = genomic DNA
acgtctattgacgacggttaggtcgatttagtttccttcactatgattgcttgccgcgtttctggaaatctgccgcccatttcttaaaaaagtgaatttttcttcccggagacgtttccggaggcgacgcgccctgctttcctccagatgaatgcttctggctgcccgtgacaaattcccttcagcgtcaatcaatgcctcaaccagctccctttcctgcggctccagggattccatttcccgcgcgaattcttcccggaacatcagcccggaaaggaagtccgaatgctcgtcagcgtcaatttcccggccattttcatattcaagcggacgggcttcccgcaacagtagtctcttcttccggttcctctcgcgcaaatagcgttccggctcaaaaacggttgcattgaccaggtatgtttttatgccggcgcctccgcttttccggtaacggcggcaaatttcccagcatcggattctgaaccgttggaggacatccagatattcttcctcaggtatctgaaacccgatggattttgcttttgatcggaggcgctgagaaaccgttgaaggcgaaacgggatcttcgcctcacgacacggcgaggtatcaggtatttcaccggagttttgatgcggaggtgtccggaattgaaaaaaattccggtccgggaactgacgccggagcatggcgctcattttccggaggttatgtttgcatcccacaggcagcgttacaagggccgggcggtgatgaggatttgatggagaggggaatttcgtaaggtcccggaccagtaaaaagggaggaattctgaatgtctccgttcatgctgtgcttcggcggctcctggcgggatacggggcagggggacggcctgttctatcctcccaattagccgacgcgttagaggttgctccgggaaaaagcgggatggggtggtacaaccgctttggagaatagaatgcggatgcgcggaggcataccaatgtttcctgctacgccaaatggttcagggatttttgcctgcctcagctggaaatgaggcataagggagtttccggggctattccctaggcaggaagtagccgcgctgtttttctgagatgggcatgtccaggcgttccataacggccagcatgtcttcccataccttgcgtttttcccgcgggctgtccgatctgagcaggtagctgggatggtaagtgacgcgtacgggaatgccgttaaggttgtggaacctgccgcgcatggaactgacggatccctgttcccccagcaggcctacggctgcggttccgcccagggctataatcattttcggctggatgacccggatttcatgcatgatgatgggcaggcacgcttcaatttcttccggcgtgggggcgcggttattggtccgctggttgggcagggccgggcggaatttgacgatgttggaaatgtaaaccatgtctctggagagccccatagcccttaatatctggttgagtttttccccggcacggcccacgaagggctcctgctgcacttcttcataatatccgggagcttctccgatgagcatgagtttcgtatggggattgcccgtggcaaagaccatggtgtcccgcagggagttgagttcccgcgccggtttccagttttgcgccagatggcggaggtattgcagcttgtcttccatagtcccttccgggagggtgatggaggaggccggttccccgctttgcggaagcagttccggtggttccggcatttcagcaggtgcgggagcaggagcggacgtctgcaggggcggcggttttggagaagcggacgctgatgcagcgggacggcctccctgtctggcggccacgtaccatgttctgagaacgtttctggcttcatccgtcaggcttgctcgcgttgttccctgctggatcagggaatcaagataatggcggaaaaggctgttcggcgtagcgctcatgaaaggataaaccagattagtccataagaggccgtctgtcacgacgattcgcaggtccctctgctttcatggaacgcgccgttccgggaaatgacacggtaaaagatggtatcttttaagagggagggggcaaattggggctttccggtccaggaatggaaatgcaatcggctctctccaattttacttagttcacttatgtctttttctgaagaattaaacggtttgatggattacccttctcctctggtgcgccgtttcatggcgttgctggaaccggttgacgacgcccgcctggaggcgatggcgcaggagagccggcgcctgacgcggctgcatttcggccggaccatccgcctgttcgcccccatttacctgtccaacgaatgcatcaataattgcaagtactgcggtttttcgcgggacaatcccattatccgcaccacgcttacggtggatgaagtggtgcaggaggcccgttacctgcacggtctggggctgcgcagcatcctgctggtggccggggagcatcccaagttcgtttccgacgggtatatgcaggaatgcctggacgccctgcattcctttattccatccctggggctggagatagggccgttgccggacgaccgttatgcggagatcgtccgccacggggcggaacaattggccgtgtatcaggaaacctataaccgggaagtgtatgaaaccctgcatacggcagggatgaagaaaaatttcaactggaggctggattgtccggaacgcgcctatcagggcggtttccgccgtattcagataggagccctgttcgggctttcgccatggcggcgggaggccatggcgcttgccgcccatctggattacctgcagaagcattgctggaaatccgcgctttccgtagcgtttccccgcatgcgcccctacgccgggaattacgaatatgaacctgatccggacttgatgctggatgaccgccattttgtccagctcatggccgccctgcgcatctgcttccccaggataggcatgtccatcagcacccgtgaacccgcgccgatgaggaatgccctgatgcatttgggcatgactcacatgtccgctattgcgcgcacggaaccggggggctacacgggcgtgggaacggctgccgcccatttgacggtgcggggcaaccgggtggatcttcccgatgaccggaaagggcattgcaaggcgacggaacagtttgagatttccgaccagcgcacaccggagcaggtggtcggcgccatacggaatgccgggctggagcctgtctggaaagactgggatgccgcgctggatgtggtgtaagagagtcttatcccgtctctcttccgcagaatgacatccatatccccgtgatgttgtgatggagcattgacggcatgctccggctgtcatatttccggcagtaatgattcgttattattgggggaggttttggccgttcctcctgtttgcgttcggtattgaggcggtggaaaatctgtttacggtatttttcgaataccggaacatggatttcggattggtttcccttctgaaaacggcatacgtttttctgacggagtttgccgtcaccatgtgctactggcttattccctacgccgtttatttgtggattctgccgcgcgggcaggcgggagggaaggcggacaggtggttcacttccgcgtggtttttcctgtttgtgctcgccaatctgtttgaagatgtggcggaagcctttttctggaacgagtttgaagctagcttcaatttcattgcggtagactatttggtttacaccaaggaggtcatcgggaatatttacgagtcctatcccatcatccctattttgggcggcattctggcggcgtccgttctggccgtctggggaatgaagaggtttttgctttcccggaacggggcggtgcccgccggatggaaacgaggctgtgtggtgctgttcctgctggcctgcgtcacgggaggatattggctggtggatatcaaggatgcagacgccgtgaacaaccgttataattcggaaatggccaaggatggcctttacagcctgttcagcgcctttctcaagaatgaactggattaccgcgcctattaccggacgctgccggatgcggaagcggcggcgtttctggcccgggagttcacggcggatgacacgtccgtgccggaggcttcgtccggcagcgtaaagaggcaggtgcgtccttccgggggggctatccgcccgaatgtcgtggttgtggtcatggagagtatgggagcggaatttttgaacgagtgccgggaagacggggctgacgtcactccgtgcctgagccgtctgggaaaggaaggcatttttttcccgaatacttatgccacgggcacccgttccgtacgcgggctggaagcaatcagcacatccctgccgccgcttcccggcatgtccatccttcgccaggaaggaaatgagcatttgcagaccataggttccatattcagggacaagggatatgatctcaaatggatttacggcggctacgggtattttgacaacatgaattattttttcgggaacaacgggtttcaggttctggaccgtaattccatggatgattccgaggtgacccattccactatttggggcgtttgcgatgaagatttgttccgccgcgccgtacgggaggcggatgaatcctgcggacgcggcaagccgtttttgcaggtggtgtttaccacgtccaaccaccgcccctacacgtatccggaagggcgcattgacattccttcccacacggggcgcatgggggccgtgaaatacgcggattatgcggtaggcgcctttgtggaggaggccagaaccaaaccctggtttgacaacacgctgttcgtgttcgtaggagaccacggcgccgggagcgcgggaaagcaggccctcaatccggaaacgcaccgcattttttccattttctacgctccggctttgctgaagccggaacggcgggacactcccgtgagccagattgacgtgctgcccaccctgctggggctgttgaactggccgtatgatgcggccttttatgggaaggatgccttgaagccttcctatcaatcccggtattttgtgagcaattaccaatatatcggctatttgaaggggaaagacatggtagtgctcaaaccccagcgcggagtggaatttttccgggacggagaggccgttgagccggacgggcggatgaaagagctggaaagggaagcggtttattactatcagcacgcttccggctggcgcaccagtttgaaggaataaggcccccgcaaggtgcggaggccgtgattttggcggcctccgcccgcgcacggaaaatgcgttcaggatttgcttccgtccctgtaatcctggagtgcgtcccaatggaacgtgaagtgcttctgcatgtgcagcccgttggcgagaatgaacatgagggaaatgcggaattcgttattgttcaatccttccagctcttttttgtcaattttcatggagaatttcccgctcttttttccaaggcgccgggagaaggaaacggcgtcatagtcctggttgaccgcataaggaggatcctggatgtaaacattcagagctttgacggtctgggggcttttataattgccggaaaccagaatctggtctcctttaaaagaaatggctacgtccccgacctccacttccggcttgccttcgtagaattgctgggccggggtgacggaaaacacttcacaggcatccagcagggcgcagctggccggggtcaggaacgtgggactggtcccgaacgtgtaattgcccgaacccatcagggctgtgccgtattttttaccgtccgaggcggtctgatggttgtgcggcagattaaggccgtgccccaattcgtgggccatgcctccataccatttggtcagcagccttccttcccttgttttctgccccaggtgtttgatgtcgaaggccggataatccagggcgaaacagttgcgccccatgccgtaaaagggaactccgccgggattgtcggggccgttcttttcgtcattccaggtgggcatgatgatgagcgtgtgctggctttttttcctgtccggatgggctttgaaaaattcgtcaagttcctgggccgctttccagccgcctccgttttcataaggataatgggccgccggatttttggccttgtattcaatgatgttcacgcggcctggggatttgatgtccaggccgaaggaacgcgcgccatagccatgccgctgcatttccttgccgtaaaactgctggaggtaaaggagcagttcgctgaggcgccgttcataatccggaacgggttccgtatcgctacccagaaaataaacgatattgagctgacgggccgtttttttcagggcaatccggtctttcagggcgtccggaacggtgacttccgcaaaggatgtaccggaggccactcccagaaagaacagagaaaaaaatgcggagagaagtcgtttcaacatacatgccaaagtaggggcgtcatttttaaagacaaggaaatttactgttctcgccgccattggaggaagcgtccctgggccgggagggaaataatgggggaaagaatccgtcatgtggcggccgataagttcggaatggctgaaagatagaggttgcgaaggcagtaaatatgtgacattgtttattaaagcatgcatttccaatctctatatttatctgccgtggcggtaagtgccgtttctttcgggtggggggctctggataagccttccgcctccaatttgatctggtctgatgaaccggccgtagttgtttatccgcaggaagacaaaaattccgagggcagttttggcaagtacagaaagcctgcctccgtctgggaagcggaggggtatcccattggcaatggccgcgttggagccatgattttcagcgctcccggccgcgagcggctggccctgaatgaaatcagcctttggtccggaggagccaatccggggggagggtacggttacgggcctgatgccggaacgaaccagttcggcaactatcttccctttggggatttgtttgtggactttaaaaaaggcgaccagccggcttccctgtctgtggaagattttacgcgctccctggatctccgggacggtattcataaagtgaattacaaggcggacggcgtaacgtatgaccgggaggcattctccagcacgcctgccaacgtcctggtactgaactataaagccagcaaccccggccaattcagcgcgaatttttccgttaacagccagcttggagcagatatttccgccaagggatccgtcatcacctggaaggggatgttgaaaaacggcatgaattatgaaggccgtgttttgatccgtcccaaaggcggtacgctttctgcctcgggagataaaatttccgtgaaaaatgcggattcctgcatggtcgtcatcgccatggagacggattacctgatggattataaaaaggactggaagggtgaatctccctccaggaagctggaccgttatgcggccaaagccgcttctgcggattatgccgccctgaaacaggcccacatttcccagtacaagtccatgtttgaccgggtgaaggtcaacttcggaaaaacggaggaggatgtagccaagctgcctacgccaaagcgtctggaggcctataagaaaaatccggcagaccccgatctggaggaaaccatgttccagttcggccgctatctgctgttgtccagttcccggcccggtacgctaccggccaacctgcaagggttgtggaatgattatgtcaaaccgccgtgggcctgcgactaccataacaacatcaacgtccagatggcgtattggggggcggaacccgccaatctttccgaatgccatgaggccctggtcaattatgtggaggcaatggcccccggctgccgggacgcttcccaggcgaacaaggggttcaataccaaggacggcaaacccgtgcgcggctggacggtgcgcacctcccagaatatcttcggtggcaacggctggcagtggaacatccccggtgcggcctggtatgcgctgcatatatgggaacattatgcatttaccggtgatagaaagtatctggaaaaacaggcgtatcccctgatgaaggaaatctgtcatttctgggaagaccatttgaaggaactgggagccgggggcgaagggttcaagacaaacggcaaggatccgagcgaagaggagaagaaggatctggccgatgtgaaagctggaactctggtggctcccaatggctggtctcccgaacatgggccgcgtgaagacggtgtgatgcatgaccagcagctcattgcggagcttttctccaataccatcaaagccgcccgcattctgggcaaggacgccgcctgggccaagagcctggagggcaagctgaaaaggctggccggcaacaagataggcaaggaaggaaatcttcaggaatggatgattgaccgcattcccaagacggaccaccgccatacgtcccacctttttgctgttttccccggcaaccagatcagcaagctcaagacgcccaagctggcggaagccgcccgcctttccctagaatggcgcggcacgaccggagacagccgccgttcctggacgtggccgtggcgcacggctctgtgggcccgcctgggcgaggggaacaaggctcatgaaatggttcagggactcttgaaattcaacactttgccgaatatgctgactactcatccccctatgcagatggacggcaacttcggcattgtaggcggcatttgtgaaatgttggtgcaatcccatgccgggggcctagacatcatgccctctcccgtggaagcgtggcctgaaggctccgtgaaggggctgaaagcccggggaaacgtcacggtggatttttcctggaaggacggcaaggtaagcaacgtgaagttgtattccgcccaacccaaggtgttgcccgtgcgcgtcaacgggaagatgacccgcatgaaaaccctgccgctgaaatcgggaacggaatcttcgccgtccgcggcccggtaaaaaaggaaatccatgatccggttttaattctggaactaaaaatagtcatggcttccagtcctttcgttagggctgggagccttttttatcctggacctttgcggaagggacggtatttgtttcaaaggaggagcttgctgaatggcgcgttccgaaagaaggaattcctctcgggatgtaaagattgggaagggttttcgcaaggggcggtccttcgccccgtcttaaggaaagaagggctgcgctctcatttcttttccatctgcctgagcagggagcaaatggcgcaggaatggagggaacacaggtcttcgtgaatttgaagcaatgcctggtggtgccaggctttcgcaagaaaggcgtgtgcatccggcctgccgcccagcagggattggtggacggagaggacttttgttcccgcctgtccggcccggagggaaagataatgcttccatgcatgttcgtcatctttcatcggaagaaggtggttgatgatgaagtccagaattctatcccggcccatcagggccatggggcggggagacggtggggaaggaagcgttacatgggtgctccagtaggggtgtgtaagggaggagaggtacttcgtcagctcttccgtatgtccggcaaggcaaaggcgcttaaacgcatcaaaatctgctgcgatgacggccagagcccctacgcgcctctgcggatggttggccggcctgttgccggaatacgtccagggaaaggagcggtccggcgccagttcaaattgcgcccgcaggggccaccattgagcccagagttttttgtggagttctacggcttccggtgtgcaggaggccggaagaacgggaaggaggaagcccgccgtaccgaaaagcagggcttccggacagttccggatggaacgcaggggcgcccgcagggccaggtggcgcatggcggttttgttggcgtgatagcccagcgtttccgccaggttttcaaaaagggcctgttcctctcctgcgtatttggcgcgttccgcatggcggcggtgcttgttccggaacctgtaggctgccgctgattggaggagtgtttccagaaactccggagccatggatgccagcagtccggagtggcggcagtggcgtaccggggcgctgccggaaggggatgttcctgaccgcgccagcgcagcggggggaatgacagccagaggaacgcgttcatgcctggcattgcgggtgaaccatttcctacggctgggcgcgcaggcgaggtgcaggatgacgccgttaaaccccgggttggaaccgtgcccgtggcgttcccagtcttccggcgtgggatccagttcgatatctcccgattgcgggacgccattaatgcatatcctggcgtttagaaagtccggtccggcggatttattccagttcccgaaatccagaatgtgaacgtccctgcctgaatcatccgtaaaagaggttccaaatactccttccagaagaagaagctgaagagtccgctcgtccggaagggcggaatgattggaaacggaatgttccctgacggcggacggcccttcttcccttgctgcggaaagggcttcctcatacagggaggccatggagcgcaggtccatgtggaggggaggtatttttattgatctttctgccgttccaattcttctttcaggcagtcggttacgttgcggaatttttcttcgttctcttcgctcatttcgctcagggtcaaatgggagttgagaacgtggagagtttgctccttggcatccaagtgaacggaaggggcattttcagtacccagggcggcacgtatctgctctacttttcccctccagggggctgtgggcggttcaatgctgagcagggcgtccagccccaggctttccagggcgctcaggcagcgttcgctcggggaagcgatttggacggatcccccgatgggaagcagccgtcgggacaggcccgcaagagtgcccatgaaggtggagtcaatgccggagcaagtttccagatcaatgacgatcagacgccctccggaagcgatgtaatcgtcccccagggatttgacagtcggactattggcaaaacttccgcgtccggaacaccggacccaaagaaattcatcaaaaaggccgaaaaggatggaagaattgttattcacgtcgttagaaaatggaaaccatatgaataacaagagaaacctctgcggtcaagtcaggatttaatttgcgcgccgccggaagaaggttcgttttctcgcatgcagaaccttttcccgcggcgctcttttcgttattcggagggatgcctcaggagttcttggtgccttcccccgtaccgggcaggaaacggtaataggtttccagcatcagcgttgccaggcactggcggtagatgttttcagatttattgctcatgccggaaacgtatcctacgtcatttttccggaaactgccgtccgcattctggccgctgagcacggcgtcccggaatgctttgttgtaagaggtccatacgtctcctccgcggttcatggcagcctgcacgcagtagtaatgcatgtagagattactcttgacattttccgtgccgcttccctggccccactggagggtcttgacgttgttcttaatccagtccaatcccttgcgggctgcaccgccggagccgtcgcccgtcatttgcagagaaagcacgcctacgcctaccagggaggaacggggcatattaccgttttccttataggaaaatttgccgtccggcatgacgttcttgcgcacgtagcttgaggccttgcgcagcgtagagcggatttcccctttggtaggcttgatgccgccgtgttcggcagccttgagagcctgcacgttccacccggtgacggaaaggtcgatgtccggattaatcttgttgttgtagctgtagccccagcccccgttgggacactgggcgtcaataatcctgtccacggcttttacgacgaccttttccagattggagatggaggggatgtccatctgtttgcagaaggtataggcttcgcacagggcataggtggctaccgcgtggtcataacagatttccttcagggcgggctgttccgaaaggacggggtttttcatgcctaagtccaccaggaaggaaatgcctttcaggacgttttctccgaattcctcggaaagaggggtttcacagtgggccaggtaggtcagcagggaaatgccggtcatggaagcgcggaattgcccttcaccccaggagccgttgccgttctgctgttttttcagccagcggagggatttgactacggcttcctcgcactgcggggtgcccccgttttccgtgatgcgcttcatgcggtcgttcaaatcgcagcgcttggagatgatgccgggaatgcctcccccgtctccgtcgcccgtgccggtgccgaagccgtcgccgatgtcgatgcccatggaaagttcttccgagggaacgtccacctcaatatccgggttgaccaccgcgacgtccgccgtggcgacggcggcgatgaccttcacctgcgcggaggtggaggaactgctgggacgctgggtggtctgggtaacttccggtgtgtcgatgtccgggttgtcgccttcctgggtggcgtaggcgaccatggggggatcttccggaacggccacgatgatgtgcaccaggtagaggaggaggcccatgagggcgatgccaaggaaggagacggaaatggcggcggtcagtgtcttggtccgctgcttcttcaattccgcaagggcattttcagtactttcaatgtggagactcatagagggaggtgtctggttggcatcaaggcaaaaactcccgcatttctgaaaaatggggagaattgccctgtacaggtatgtattgctggcctgcctgtttacaaggctggcagcgtactaaagccagacacgcctgtctgtcaatcagattaggaattcctggtgccttcccccgtgccgggaaggaagcggtaatacacctccagcatcagcgtagcgaggcactggcggtaaattttgtcgttgatggaacctccattgctgttcacgagaccccccggtcccgggaatccgttcggggtgaagcttccatcggtggcctgggctccgagggtggaatcacggaaggccttgttgtacgctttccatacatcccctccgcggttcatggcggcctgtaccccgtaatagtgctggtagaggttggaggaagtattgttcgccttccagttgaacggctggttggtgttcttaagcatccagtccagtcccttgcgggcggcgctgtccgaaccgttgccgcacatttgaagggaaagaacgcctacgcccaccagggagggacgtgctgcggcgtcttccctgccttcctgcatgtaggtgaagaggccgtcgggcttgccgcatttctggcaataggccgcggctttgcgcagggccgtgcgtatttcgcctttggaggggcggatgccgccgtgttcggcggccttgagggcctgtacgttccatccggtgacggaaaggtccgtatgagcgcccgccttcgtgttgtaattgtaggcccagccgccgtcggtattttgattgtccacaatcttatcaacggcctttatgacgactttttccagattggagatggaggggatgtccatctgcttgcagaaagtgtaggcttcgcacagggcataggtggctaccgcgtggtcatagctgacttcgttcctctggggaaccagggagagaacgggatttttcatgccctgatccaccaggaaagagatgcccttcaggacagtttccccgaattcttcggaaagaggcgtttcgcagtgggccaggtaggagaggagagccatgcccgtcatggcgcatttgtaattatggggagccccgccccaggaaccgtctttattctgctgttttttcagccagcggagggatttgactacggcttcctcgcactgcggggtgcctccgttttccgtgatgcgcttcatgcggtcgttcaaatcgcagcgcttggagatgatgccgggaatgcctcccccgtctccgtcgcccgtgccggtgccgaagccgtcgccgatgtcgatgcccatggaaagttcttccgagggaacgtccacctcaatatccgggttgaccaccgcgacgtccgccgtggcgacggcggcgatgaccttcacctgcgcggaggtggaggaactgctgggacgctgggtggtctgggtaacttccggtgtgtcgatgtccgggttgtcgccttcctgggtggcgtaggcgaccatggggggatcttccggaacggccacgatgatgtgcaccaggtagaggaggaggcccatgagggcgatgccaaggaaggagacggaaatggcggcggtcagtgtcttggtccgctgcttcttcaattccgcaagggcattttcagtactttcaatatgcaggctcatacagtatgtgaagcttcctgaaaataatagaatgtttttccggttgaggcgagttcaaaaattttgatggtctatagggtggtaaatgaccagatatgaacaaaatggaattttataatgaacggcttatattggttgcatcatatacccgacgggggcgtctgccgggacatgggctgtgtttctggtttgccggagaggaatggaaaaggctttttgaagccgggaaggagaagcagcacgccgggaaccgtttgcctttgaatgtttttagctgtggccggcagaggaagaaagagcggttccgggagaggagcgtacgaagaaatttgaaaaaacaagccctgccatggagggcatggcaggacggaaaagagggtggccttttgcgggcagaggcattaatagtggccgcggcgcgggccagtcatccacttccatgcggtttccacaatggccccggcatccttgcacctggcttcccagccgaggatttccttggctttcttcggattggcaatcaggcggggcgggtcgccttcgcggcgcgggccgtagcggacgggaatttttttgccggtgactttttcagccgtttccaggatttcccggacggaaagtcccaggccggttccgaggttgaagcattctgtggccccgcctttcatcaggtagtccaccgctttcaagtgggcgtccgccaggtcgttgacgtggatgtagtcgcggatgcaggtgccgtccggcgtgtcgtaatccgttccgaagacttcgatgtattccttttccccggtgagcgtgagcaggatgttggggataaggtgggtttccggttcgtggtcttcaccgatcaagccgtcctcgctgcaacctgaggcattaaaatagcgcagaaaaacgcttttgagaccccaggcgcggtcgcagtccctgcaaactttttccagcatgtacttggaactcccgtaaggattgataggatcctgcttttccgtttccgggataggaatctgggtgggaacgccatacgtggcgcaggtggaggagaaaacaaagcgcttgacgccggcggcttgcatggcgcccagaaggacgaggggcctggcgatgttgttcatgtagtacttgagggggttctggacggattcccccacattgatgaaggcggcaaagtgaatcacggcgtcaaagttgcccttcatcaggagaggatataccacggaggcatctcccaaatcccctttgaccagtttcacttccgggtccacgagggctcccgcgtggccgtacaccatgttgtccagcacggtcacgtctgcgccggttttgacgagctggcgtaccgtgtgggaaccaatatatccggctccgccggttacaagtactttcatgattttatcaaatttgctgttgagccggtttaactttttctccggcaaaggcgtccggacattttggagtctgcggaaccttccggttcactgcaggctgaatccctgttccagacgcctgtaaaagtgacatgttttcccctttttgtcaatttgcgatatatcttgccgccgtctctccgttctttgcctgcggcggttggagcttctccgttttcatgccggaaactgccccgctttttactggctcctgacaggcatttttgcgaacatcacttcattatgaaaccgtccgagatcaggaatgttctggaagaccatgaagtgcgccccagcaagtccctggggcagaatttcctgacggatgaaaatgtggcccgctggattgtggagcagctcgaaatccggccgcaggattgcgtggtggaggtagggcctggaaccggctccctgacggaacatgccgcacccctttgccgcaaactggttctggtggaatttgattcccgtctggcggagtaccagaaagagcgctgggccggtgatccccatgtggaggttcaccatgcagacggcgcttcctgggatccgcgggggctgtttgcggaggcccctgtcaaattccttggcaatcttccctattccgcggggggagccatcctccagaatttcctgtccaggcccagtgctgtggaacgtgccgtggtgatgctccagaaggagtttatcgatcgcattctggcgacgccggatgatgatgccttcgggctgttgtccctgcgcatccagaaaaactggattccccgtgcccttaaaaccattccgccggaagcgtttcatccccgtccgcgtattgattccaccgtgatgctgcttactccccgccctgcccgcgagctgcctccatatgacgaccgcctgatggatgaactgatgcgcaaggctttttcccagcggcgcaaacaattgaaaaaacagctccccgcttctcctccgtgggagggcgtggctgcttccctgggactttccccttccgccagggctgaggaattgaatttgtcccaatgggtggaattggcgcgcgtttatgataccaatcctctcaaggatgtggcgcagagcggagatgaattgtttgacatcgtggacgaactcaatcaggtgacggggcagggcacgcgccgggaaatacatgaaggcagccttcgtcatcgcgccgtacatatgttcctggtcaataagcatggagctgtgcttctccagaaaaggtccctgtggaaagacaggcagccgggcaaatgggattcctccgcagccgggcatctggatgccggggaaagttatgaggaagctgcggtgcgggagctgaaggaagaactgggggtgtccggctgcgggctgcagaaaatcgcggattttgacgccggagaaaataacggctgggaattcatctccctctatgaagggcggtattccgggaaggttcgttttccggcggcggaggtggacagcgtgcagtggttcacgccggagcaaatccaggcgtgggtggaacgccgtccgcaggatttctcgcctgcgttcattccctgctggaatgcatggctggtcgcgaatagaaaaaatcattctaactcaaatacatatcatgataaaccctgatcaattatctccggaacagatccagtccatccggacctgggcggaagaaggactggatttaaacgccatccagaaaaggctgcatgaggacttgaacatcaagctgacgttcatggatacaagattccttcttcaggatctggatatccgcatcagccagccggagccggaacccgaagccgagcagcccggagagcttcccggaacaatgcctccccctgcctccctgctgggaaaaacccaggtaactgtggatgaaataacgcctccccacgccctgatggccggcaaggttttattcaagagcggcgcccagggcgcatgggatattgaccgtaccggccgtatcaactgggacgttacgcttggagaacctacggcagacgacctgagggaatttgaaacggaactgcaatccgtcattcgcagccgcatgggagccatgtgagggaaacggaaaatatttcgcttgaaatggactggaagcaggaacttgccgggtggcggttatttccaataaaagccttggctggaatggaaaatgccgtgtccgcatgccattcgggagagaatgtctgcccggaaaaaatgcgcgttcatttggttccatagtaaaataaaagcaacaaaaggactatcatggaaataccggaggaaatgattgaaacgctggtgcctgccgttcgggagcagctggagtcgccggacaccgcttatgtcaaaaactgtctggaacgcctgacggggcgggaaaaactgggagaacaggaagctctggaactgatggcgcaggctctggccattactattaatgcgatggtggtggggggccgctcctttgattcgggaaagtacaaggcgctgttgaaagatctcccggctcttccggatgaggctccgtgataaatctcgacaatctccggaattgattcataatcctttctttcacttgaaattttatggcaaaaaaaccattagaaacaggtgctccggaagcgtccgcagctaaaaaaacggctgctcgcaagacgacggccaaaaagacggcctctactaccaaaaaggccgccgcagctgaaaaaaaagctgttgctgacgccgcttccgtagaagcacccaaaaccaaaatcaaaacggtcaagtccgccccgaaaaccgcggtgaagacaaaaaccgcgaaaacagccaaaaaggcggctgatgaaaaggcccctgtctctgaaacggttgttgccccttccgaggccccggctccttccgctcccgtggaaaaggagatgatgcccgaagctccccagaagccccaggctgccgctccggtcaaggtcaagcgggaatcgttccgccccaatcgcaatgcggaacagcaggagcgccatgaacagcatggcggagatgtctttgcccagccggaaacggtgggcggcgcctccgaagggccctttaacaagcgcaagcgccgccgccgcaataagaaaggcggcggttccgaagaccgccagcccatgcaggatgccgcttctctcaagcagttggattgtaagaaggtggcttcccgagcctggaaaatgttcctggcggaagtgtctgaagaaggccttgccctgatggacgaccagacggcgcgtgaggcggcccgccgcgctttccgctgtgcggaattcttcatgatggaggaagcgcgccgcaagcatgcccagaaagcagctctccagcagcaggagaaaacttcttctccggaagaggaacgggattccgaagaggattccggcgaagaataattcctgtctgtgttgatgtttttgccctgcggcggatgccgcagggcgtttttgtatcctccgggcttattttccggagtttgaatggccgtgttttatccggtgcattgggaagcagcatgcgccgccctttgccacctgggggcaaaaagcagccttttctccaaccagggcactttttgagaatgggagagcgttggagccgcttggatgaaagcggactttatttcgtgccgttccccgttcttgttcctcctaaacctttttgcctctccatttcccgctcttgaggtaccaccatgccaggaagatcagggtaacgccgtaaacgtgttcggaaaaccagcagagagccacatccggcttgagcctgatgatgccgtaataaatgacggccgtgtaaacggccagggaaatcatttccatgatgaatcccgccctggtattgcctgtgccggatacggcattgaacaggatgaatgacggagccatgatcagtgtggaagaagccatcacatacacggaattgacgctggcggcaatcagggacggactatccgtgaaggcacggaggacggactccggaaacaggcacagtatgatgagcagggggatcaggatggcgtatgtcagtttgagagtcatgccgcaggttttgaacaggcagcgctgttctcccgctccaatctggttgctgatgagagctcctgccgtggtggcaaaagcgctgatcaccatgatcagcagggcggaaatattgcggacgatgttggtaacggccagcgggcgttcccccaaatgttcaatcgccaggaaaaaaataaaccagatggagacggaaataaaagattgcaccatggtccatccggaaatggacagcattcccttcagcagatgggggcggagtgtgaatgcccggcggaagccgtacttccgtttatccgccgtcatgcttgtgtagatgatgaaaaagagaagggagactgcttccgatacgctggaggcaatggccgcccctgctatgcctgcggcgggaaagccgcctttcccgaaaatgaggcagtaatttaacgcgacattgctcaggagcatgacaatggaattgaccgtcagaatcttcgtctgggtaatccccacgtaataggctcggaacatgacgcagaggaaagagaaaaagataccgtaggtgcgccagtgcaggtaatccgccgtggccccgtacacctgtggggattcaatgatgtcccgcaggatgatgggggaaaaatattgggatgcggcaaaaagggctaccgccaggaccagcatgaaataacagccctgaaccatggtgggggcaatcctgttgtaacggcgttccccgttgcggcgcgcaatgatgatttgtgcgccaaagccgaagccgaatgccagcatgaacatggccatgtaatacacgccgcccagagcgcatgctcccagcgccacgtctcccacgcgccccaggaagacggcatccgtcaggccgatcatatgctcaatgatcaggctgatcatgagggggtatgacatgagccatatcttttgataggaagtaaaagaaggattattcatagcgggggcagcctgcgggcatgatccgccaagggcaggcgctaaaggccaaatattcttgaattaaaatgttttcttgcaagaaagaaatgcgtttgcttccgcacatgtcatgaaaatgggggtaatgccccgggtcagctgagcggcagtctggtttccggataccgcaggggggatttggttggttgtttcatgaaggccagcacgaaagccaccatgcccacacggcccacaatcatgttgaacacgatgatccatttgccggcatcactgagttccggagtgacgttccatgaaaagcctaccgtggcgaaagagctgactacctcgaaaaacaggcgttccagactcaaccgcggttctgcaaaacacatgaccgtagtcatcatacctacccaggctccggccagaatgacggtgatgacggcccgttccaccacattgcgggcaatccggcgcttgtgcatgaccacgtctttcttgccctgtaaaatgcgcgccacctccccgcaggaaacggcaaatgcggtggtatggactcctcccgtggtggaaccgggattgcctccgatgaacatgagagctcccagaaacagggcgtatggagcgctgttgagcgccatgtccgaaatgttgaatcctgctgtgcgggccgttgcattgaacaggctctcccacaaaatccagtaccacggatcggcagacgtgaacaggctgccgtcaattattttaatcaggaacaggatcagcccgccgccaagcaccagagcggcggtcatgcgtacgaccagccagctgtatgtggaccagtggcggctgacggtgttccgggcatcccagcccagtgcgactctggcccggcggacgatttccagatacatggcgaatcccaggctgccgcaaagcaccatgaccataatgataatctggccgcccatattgtaggctacgcccggtgtggccaggttatccgcaaacaggctgaatcccgcattgcagaaaccggaaacggaatggaagacggcgtaccaccagagcgtgtctccctccagccccggaacatgtctccaggaaaaatagaggcctatggctcccagcgcttccactccgaacgtgacggcaataatattcttgatgaaccggtctacctgggcaatgccttcttcatccagcaggttgctgatggttaccttggaacgcaggctcaacccctggccaaccatcagggagacgaaataagtgaacgtcatgatgccgaaagctcccacttggaaaagcaccagcaaaatggtctgtccgtaattggtgaagtgttcatgaacattcagggggaccagccccgtgacgcagacggcgctggtgctgatgaaataggcgtccgtggcggaaaggacgatgccgtccttggtagctcccggcgacatgagaagagttcctcccagcgcaatgaaggcaatcagggtaagcaggaaaagaagggcgggacgaatgcgcgggaggtggaagcccctgttccggcgggcgatgcggaaaaaatattccttgaggttcagcagaggggcggctccgtagcagaggcagagcgcgcggaaaatgttctgaagctctattttggagataaaggtggaatggaaaaagtcgcctgccagcatgaccagaatcaccagccccagccccagttctacccaccgggggttgcggatggccctggcaagccatttttcccgcaaaatgccgatgacgcccgtgagctggcccagcaccaggaaggagagaatttcgcggaaatagcgcagggaaagctggtcttcatgaatttccccgaagccgttccaccacagcagccacatcaatgcggccagtgtgcacaggccgaaccccatttccatgacctcaaaacggttcaatagcggtttttcattcgtctcattcacaagcctgcaatggtgatgcctctgatgctggggggagactactgcatacggaaagatttgagaagcccttatatcgtttccaggcggccccggctgaaggcaggaaggcgccttgggaaaaaatttttttcatgtgaaggaaaatagttgccaatccggcgccgccgtgcataataagccccgttcttaccaaaccatgtgcgctcgtggcggaattggtagacgcgctagattcaggttctagtgggggttcccccgtgaaggttcgagtcctttcgggcgcaccaaacaaggccctgcaagttaactgcttgcagggccttactggttttatgatgtattcgtgcattggctttgacgcaacgccggaagattggtgaaggggctggataaggattattgctccgttgttaaggaacgcctgtggttttcaggggagggggcgttgcctttttgggagtggatgcctgcgaattgttcatgcgccagcttcatgaacatgcaggaggaacatttcctttcagcggtaatgcgttgtctgcgctcctggtcgtaaagtttctcgtagcgttcggcgcgtttcatttccctccagaggaagatgcccatcacggctgccacggaggcgccgttttgaacgtattcaagcaggggattgagttctgaagtcgccatgcaaacaaccgcaagggtgttggctaaaacgacacttgtagtaacggcagtctgggtcatggggctggaaaggtcatgtttcgaaacttctgcgcgcttcggaaatgcttccgaattgatggagctgcaaatgcggcggatctgtaaaggatttccatgttcctccccactccaggccgtcaatttttgcgtaaagtttgccaagagtggtgtaaagagggtgattgggcaggtagttgcggtcctggaaaattccaaaatcccaggccaggccgaagttgtgccagctctggccgccgcgggcattcgttactttagggcgttgcctgtagaggtcattctgttcggcatacgtgcgcgttccgcagataatttttgcttcatatccctggttgacggcttcattccgggccagtttgaaccactgccgggcggctttttgcgcttccggaagaagggtggagatgttccgttcggtgcgttcgtcaaagcatccggtctccattttgtaccggtcggcgtccgtgctccagcgttccgttccgttccgcgtgccgttgccgggaatgccgtcaatggctccgtgatagtacccggccaggcgcaagagcctttgccagtagaaggtatctttctgcaggtcggaaatgctgtcagccattgtcgtggttttcctgttcctttttccggtctttggtgacaatgccgatgaggcctgccaccgccatgcctgcggcgataatctggtcggcaagagcttgttcgatagtggctccgcaggctgtggccagggcaaggaggcccagccatgtggaacgttccgtcagtcgattgagaatgtatttgaacatgtgatggtcggttggtattgaaaagtccctctgtgggagaaggaggaacccgcctttccgggaatgccaaaggatggggaaaaggtttttccgaatcctctccgccaatggggaaaggggggcatcagttctccgcacaagttgctctgaggttgctgccgcgatttgcaaagattccgcggatacttttattgcttgccctaatcggcaaaatccgtcacaggaaacgatacttgtcttttattcatgaagataccataatgcgccaaccaacgccattatgaataaccgtttaacatcgtttattatccgcagatttctaccatttctccggtatgaatatctcagggaattggaagcgtacctcagaaaagaggtaactggttttcctactgtaattcctcctgaacctttttccgaccgccaacagctggaggcataccgcagggctctcgggcaaactattatttccggcatttgttaccggatgtacggccttaaaaaggagacggacaggatttaccgtattttccaccttttgcaaacgtgcagttccggtgaagctactgcggatttgcgggaatacgccgaatcgttgggcgtttccgtcaacagagatttttccaatggaattgaactcgccgttctgcattttctggacggcaatatcagcttgctcaggcagattgaggaattgcattccattaaaaagaggaaatcgtatcgtattcttccccccatgaaagatgcgcttccttttcccatgattacggagaaagaaagggagaaggaaaaagaaggctgccgtcaatatctgtcccgaattttgtcgcagaaggggatgactgacgtatgcgttatcagctgtgaccggatttcctctgattactggtttaccatcaaacgggggcattatcaggaaaccgttgatgaggttgacacgtcggccaaagagatagtcagcagcatacgtactcccgggaatacggacattgtcatctacagggggagttcgaaatgcctgtacatcaatttacaggtcagcgccagaatccaatggatgatgcgggcctatgccgtcattgctggccgcatgctgttcggctcggatatttgggaattaagaaaccgctacaccctgagcgtgtttaataagaagtccatcgccgacattgaggtgttcaataatattccgggtctgcgaagggttgctgtttataagcttgtcatgtccaggcctctccatgcaaggaagaggacggagaaagaggtgttgatgaggggatttacaggcacttacaaaagcctttccgagcttggcgatgaagacggccccctgattgtcgtccccagcgggttccatgtggacaaggcgtttttttattttgagtttgaagaaggagacccgaaaaccgtttctttgactcccgattccaatggcctggaattggaaagcgagcaatacaggctcattgatatgtattttgaacaggctggttttgaccagttgtacaataggattcatggagcttaattacggcaatatcctcaatatcattattgaaagtgagagcctggagtctcccgattggatatggaaggccagggtgggcggggatttttatccggggcactgggtatgcggctgtaaacttgccggaatatccggtgactattacaaccccgacgatatcggcaatcctttgaaagtggtggctctgcctccggaagaagagcctttttacgagtacggagggaaccccggggaagaagaccgcaggcgtttttatgtattgaaggaaccctgctgccgggagcctgttgagaggagcgagcttttcgtgcatgccctggtgttcaggaagattgctttgaatattgcccgttcctgcggaaagacggagagggaaatcagcggaacggagctgattccggagtgcctgatcaggctttttgattttcccgtaaccgcctattttgcttttgcttttgatgagcggctggtttccagatgcctgcgcgtcatccggcaggcacagccggaaaggccctttcttctcttggtgatggggaagcgttggcggactgccgccatggaggctgcaattgttgagaagtacaaaggcatcgttgtttccattcccgacgtcatggtgacgacgaaagatggatttgcctgggcatacggctattcctgggagtggctcaggcagggcatgcctgtgcatgcgcgcacgggggaaagccttccaaccggcgccatgtgggaggatctgtggatttccgtgaccgatgagcgggaaatagtcttttcctgttcacggggcggtggagaagtgaaggaattcatgaggttttcctatcgggaggaaaaacgttttttcagcaggcaacgggcggcggcgggccaggattccacgaagccggcttataagatgctgtttttgtacgtaatgaatccggataaagcctgtttggacaaggaacttctaaaaagggccgggatagggaatgaggcggaagccaggtcggatttgagaaaagttcttgtggaaaggctgccccagctggcggaaagggacccgtttgccaagaaaagggggaagtcaaggcagggcatgtaccgccggttccaggtagtgccctgtaaatcttatatccgtcctttggaactgatgctttcgcttgaaaggaagccggaaaggcacaggtaggagggcaggcggttatagaccctccccatgagcggctagctggatgagcttattcgtccagctagccgatttcttttggtaaatatatgaatttcaaataataatgatgatgtgaaagtggggcgtttttcgctagctggataagtccgcacagggttggtgaatatgcacgaaaagcaatcaccatccttgttggaaaccgtggaaaaccacgccttatatctcgctcagcgcctccgttcaaaagcaaaatccatcggatttcagatacctgaggaagagtatctggatgtccttcaacggttcagaatccgatgctgggaaatttgccgccgttaccggaaaagcggcgccgccggcatgaaaacatacctgggcaatgcgaccgtttttgagccggaacgctatttgcgcgagaggaaccggaagaagaggctgctgctgcgggaagcccgtcctcttgaatatgagaatggccgggaaattgatgctgatgagcattcggaattcctttccgggctgatgttccgggaagaattcgcgcgggaaatggaatccctggagccgcaggaaagggagctggttgaggcattgattgacgctgaagggaatttgtcacgggctgccagaagcattcatctggaggaaagcagagcgcgccgaatcaggaagcgcctccgggaggaaaaattcacttttttaagaaatggacgtcgaatttccggaaacgcggcaagcaatcatagtgaaggcagatgaacgttctttcttttctggcgcatgccctgtccgggacagctccgtgaagagccgtttattcactttatcaagaaccataagtatttgaaaaacaaaatgatgaatacaacaaaaacatgcgggaattccagttcccggcctcagcgttcggaaaattccctttcctgtcccgtggcggatgccgcggcaggcccctctcatgaacccctgcttcccgtaggcacggttaccggagatatcaggaacaacgacattatccttccccgcctgaatattgttcaaagcgtaggcgccctttccgggatatttccccctggcagtatcatcctcaacagggaggttgttctttccgacggaagcgttcctcttgagctttccgtgctttccgcacgcaagcagtttattgaaaaactcccctttgattccgtggagaagccggtcgtcttcaattctctggaagaagtaagagccgccggaggcacggtcggcagagagccgggaaaccggccttctttcgctcccgttctgcatgtgcaggcgcttttcaaggctccggagggcgtggattatccctttcccctggagtacgaaggagaggctttcgggctggctgcctggtccctgcgcggcatggcttattaccttgcggggcgcgacatcctcacggcttccagatttgccctgaggaatgaagtattcgccggcaggtggaagcttacgaccaggctcaggaggctggaacataatggcattttcattcccgtgctgcgcagtgcgggccgcagtacaccggagttctcctcctttatcaggagcattggttaaatttcttaccctccgcaacgaagagcagcgctcatgagcagtccaatcaggagattattcgtcaacgggttcccgagcctctacggaggagcgggaacggaacttcaccaccagatcattgtctggcgcaagatgggcgtggaagtccatctcatcccgtcctgggattatcacggggagcctctttacaacgaaatggtttccctgggcgtcatcatgcacgcccccgcggactggtcggccgtccaacccggcgaccccgtgctcggtttctgcaatgccggcttcctcaacgccttgccggaaatacgcaggcatacgaaacgcacagttttcatcaactgcatgacgtggcttttccccagggaaaaggaggccatgcaaaagggggaaatcgccatgttcctctatcagaatgaagccgtccgccaggaagccatgcccgtgctgcgcaagctcaacggcgacccgcaagtgcagttcctgaccttcaggccctatttccatgcggaatcctttccctttatccgggaacgcgatgaggatttcttcggctgcgggcgcatctcccgccaggatgccgacaagttcgcggccaacaccctgcatatctacggcgcatttgaatcccccgtggagaagcgcggccttttcctcggttttgacaagaggagcgaagccaagataggccggcccttcgactggattcggattgcccgcaatcaaagggaagtttcccagcaggctttttacaggcacagccggattatcctccagccgacggatacgacggagaactggccccgcatcggctttgaggcgatggccagcggcagcgtgctcattgtggacaaccggggcgggtggcggcagatggtggagcacggcaaaacaggatggctgtgcagcaacgaaagggatttcatctactacgcttccaaaatggcctgtgaaccgaatcttcgcgacgacatggcggaggcggcccgggcgcgcggcctggagctgggcgggctggatgtttccctggagagctggaaggaagtgctggaggcgatggcaagactcccggaatgaacatggaacggaaaaccggccttatgaataaaaagtatgtttccccgtgtttcctgcccggcatgcggctgggcaacatcatgttcacgctggcggccgcctgtgcccacgcccgtaccgtaggggtggagtgccgggtgtcctgggcttacaatgacgcttccctgatgctgcgctcccggctcggcggctgggtgctcccttctacgccgtgcggcaccaatgaacctccatcctggcaggaaccttccttttcctattgtccggttccctcccgcatccggacgggcgggcttcgcggctacttccagagcgcgcggtattttgaagggcaggaagcgttcatccgggcgcttttcgcgcctctcaccgcggagaaggagcccggcgccgttggcattcacatccggcttggggactacaggcgcctccgtgacaagcaccgcattctggaccctggtttcctgcggagggccgcagggcatttatcatccgggaagaaccgtctggtgctgttcagcgatgagccggacgaggcggcggagatgcttgcgcgcgtgccggcattcggacgctttgcgctggaaatcgaccgcggcgctccgtgcgaatccctccgccgcatgacggcgatggaggaactcgtcatgtcgtgttcttccttttcctggtggggcgcgtggctgggaaatacccggaaggtcatcgttccgcgcgactggtttgtcggcggtgtggaagactaccgggatatttacctgccccattgggtaacactgtaattccgccacgaacccatacccgtaaaacaatgaatacgagaaccgttacaagcctctgggtgggcggggaacttcccctgatgtccgttctgtgcatcaaatcgttcctggaccatggccatactttccagcttttcacctaccggaattacgacaatattcccgcaggaacgcttgtgcgcgatgcgcgggatattctcccggaggaggcgattttccatgattcccacaatagcctggcgccgttttccgattggttccgcatgaaattcctttcacaggaaggcggcttctgggtggatatggacgtcatctgcctgggtgatgaacttcctgcctctcctctctggttctgcagggagtgggcggaggtggtggccgtgggcgccatggcctttcctcccggtcattccgttcccgcaaccctgtgccgccttgctgaggatccggcgctccgcgttccctgggactctccggaagaagtccgggccaaggaggaactgctccgacgtgtgccggatgtcgccgatcgccggcgccaggtgccatggggattttgcggccccaccgggatgacgcgcgcgttgcgccactgcggcctgtttgaccgggccgctccgtcttcccacatgtatccggtcccctggacgagatggcgcgactgctacaacggcaacatacgccttgccgggccggaattgtccaatgcctggtgcgtccacctctggggagagatggccaggcgggagccggatgcctgggaaaatatgagccgcaacagcatggcaggcgaactgctggacaggcatctgccgggccacgcctggaagcctgcccccgggccgcgtaaaaaagtgaatatcctggtgggcatctgcagctgcacaggcgcggcgaaccgccgcaaggcgtgccgggagacctggctttcccatcctcaggagggtgtggaatgcagatttttcctggggcggcgcactcctttgcccaatgagcccgatgtagtggccctttgggtggaggacgattacaggcacctgcccgccaaggggcttgccttttatcaatatgccctggaacattatgactttgactggcttttcaagtgcgacgacgatacctggctggcgcttgaccgcctggaaagcctctgcgacggccgctatgaccttgtgggcgacatgtccctggcggacagggggttccccagcggcggagcgggctacctgatgagccgggcgcttgtggagggtattgtggcgcacggcggccgggttcccgccgtcggggcggaggacgtcatcttcggccggctggcgcgggaactgggcgcgcgcgtccatgccacgccgcgcctcttcctcagccatgctccggcgccccaccgcctgaatgaccaggtgagcgcccattggtgctctccgggcaggatgcacggcattgaggcccttttccatgatgaaccggtggccgtttatgacgccgtgcatccccattggagagacgaactcctgttttttgcccggggccgtttcatgcgcggcgccggcggctgcaccgggcgctacgtcctgcaggacgggcttctcacgctgttctgggatgactgggcgccggaagctctggaaaaaaacggcagcggattttcccgcggtccgttttccctgacccctgccgccggcagcaggcagcttccttttccggagtccgtgtcctgacgggcatggcctccattccctgttcttcccatccgtccgccgtggtgcggcacggggaaggaagatgaaccaatccaatcggcgcctttcgcgccgcactcaaaccacaatcatcacaccatgtataccaacgaacaaccaaacgacgacccctcgttgaacaggggttccgccaacaagatgaaccccagccccgccgccggacctcccggggcggccagccagcctggagagccgggcgccgcagcgcccctccatgccatgtccacccccatccagccctacggcacggataccgttatctatgaaaaatccgacaacttcgttcagacgtcagccggagccgatgtcttcatgccccccgtcaacgacaccttcagcgtcccggaaggaggggccacggtcgtggccagcctgacggtggacgactggggcaagctgaccatctccggcccgggcggcacgtttgagctggacctgacctccgccgccgatgaacccggaaaactgggaggccaccaggaatggtccaaatcaggctcctttgagttatccgaaggcacgtacactctctccatcacgcaccagaacatcgacatgccgcacaacgaatacaaccagtccgtgtgcagatactccgtgacggtgaccgcgcatggggactccagcagcagttcaagtagttcggacacccctccttcctccctgtcgagcagctcctcttcggacgtgccgccggaggaaaaggaaatctgctgccgttgcggtacgtgcacggacgcggaaggcaatgaatacaccattgcggcggaaaaactgccgggtgaccccggcgtggaaatctgcatgtcccaggccgaattcctggccaggggaggggcttcggcgccgtctcccgcggccttcagcctccgttccgcggaaaacgcccgtgaaacggcggaagcctgcggcggcctgaaatacgtgagcccgtgggcctggcgcgtccatctggacgaaacgtccggcctcatcaccgtggtgcctccggtgggcgccgcgctttacttcaacgtgcaggccggttcagatacggccctgcctgcgggcatctcccgcaagcgcgacttcagggtgcagctgctggatgaaactctggctcctgcctcttccggtgcccccgcctacctttccctggtggacgcggacgggcagaaaatccgcttctccgcggaaaccggcgctgtggtcggcatgacctccgcctccggcagggttcttctggcggaagactacttccggaatgtgagcaatacgtatgaccatgagggcagcctggtaagcagctacagcgccgcggaggggctgatgcgcacccggactggagcggacggagaactcgtcatggaatggtacgctcccgccgccgtcacggtcctggccgacggaacatacgaggtaacgggggaaccctataaaacctcctcctacctgtcctcggaagaaaacggcgtgcggaccaccgtcatcacgcgccagcagcgcggactgccggcccacaccatcacccgtacggaagaacccggcagagtcagcatcgccaaaggccagggggacgacaccatcatccgcaccattgaaaccaaccgcctctacggaggcctctcggaacgcattgaaaccgtcagaggcatcaacgacgccgagccggtcgcctgcaaccgcagcgtcaggcaatacacggacggcggctggctgctggtaagcgaaacggaagccttcaacacgccgctggcgcggacgacctcctacgaatacaacagccaataccgcgtctcccgcatcaaccgtccggacggcggctacacgcgctatgaatacgacggcgaaggacgggtcacgcttgaggcggcgccctgggccggcggcggagaacaggtaacccggaccgaatacgccggcctgcgcttctacgacaaccgtccggcgcgtgtcgccgaattccgggtgctgtccgacggcacggaaatcgaactgacggccgccgcttacgcctatgagcagtctcccctcatggaacgggtgaccaaaaccgtgactgccgccggttccggccaggaacagacaagcgtggaagaaacgtatggagaagccgccgcctatccctatgccgccgggcaaatcaaattcacccgggacattgccggcgtggaaaccttctatgactatgaggcggccgcggaacacggcgccgcgcacaaaaagacggctatcaccaaggtcggcggcgaactggcggccggacagagccgcaagacggaatcgttccttgccgccaacgacacggtgcttgttgaacaggaaagcgtctgggatggcgacaactggctgctgctctcaagcggcgcccatgaatacgacgaagaaggccgccgcacgaaaaccatccggggcaacggccgcgtcacctccacgtcctggatgtgctgcggcaagctctcggaaacggacgaagacggaatcctgacgtcgtacggctacaacagcgcccaccagctggtggaaaccatccgttcggaaatcagcgacggagacacggtcgtaaccccggaaaccatcaccacctacacccgggacgccgccgggcgcgtcctgcagacacgccgggacaggggagccatgaccacgacggaaagcgtggaatacgacaagctcggccgtatcgtcaggcaaaccgatgtgctgggtcgcgtgacggcgacagcctacagcgaaaacggcctgacggaaaccgtcacgacgcccgccggcgccaccctcgtcaccgaacgtcaccccgacggctccgtactccatgaatacggcacgggacagcgcgaacgctgccatgtctatgacatcgaccataactgcctgagggaaaccgttaccctggccggccagaccaccatcctctcccggaccctggtcaacggcttcggacaaagcgtcctgcaagtgacgcccacgactgccgggttcctgtatgaccgttccgaatacgatgaacaggggcatctcatccgcgcatggagggatgcgggagcgcaggagggggccgtcgccatggcgcctgcgctctatgaatacgatgctttcggcaacatgaccagggaaacgctcgccctggcggagcagcccgcaccggacaacagccccatccgggaatatgccttcagcgtggaaaacgcggaggacggcatctatatggtgacggcgcaaacccgctacaatgctgaggggcagccgcttgtctccgtacggaagcagctcctgtccgaactctccggagttctggaaacaaaagcggtcatcattgacgaacgcggcttgacttcggcagaatggacggagtatgctgaaaatacgaaaagaatccaaaagagcattgtcccctcttccagcgtcacggctcaaacggtggcggcggacggctttatgctctcgcagcagaaccacgcgggcatcacggagacggccgcccgcgcctatacggccgcaggcatgaccctgacccgcacggacggccgcggcaacacggtcacgatccggaccgacctggccggacgatccgtcagcgtgacggacgccgccggaaatgcgaccgtgacgcaatacgacgcctgccacgacctggctgccatggtgacggacgcgctgggaaatacggtatgcgccagatacgatgccagaggccggaaaacggccgaatgggggaccaggacgcagcccctgctcatgggttatgacgaggccgaccgcctggtgagcctgaccaccttccgcgcggcgcaggaaggagacgtcgcggaagaccccactggccgcgcggatggagacgtcaccacctggagctatgacgacgccacggggctggaaacgcgcaaaacgtatgccgacggaacgcacgtggacaaaacctgggacgccttcaacaggctcgccacggaaacgaacgcccgcggcatcgtgaagacctgcacttacgaacaggcccgcgggctgctgacgggaatcagctactcagacgccacgcccggccagagcttcgtctacgatcacctcggtcaattgacgcaaatcactgatgctgccggaacgcgaaccttcgcctgcaatccctacggagaactggaaaccgacagccttgcggcaaacggcatcgcctggcaggtctccgagcgctatgacgggctcggccgtcaggcggggtacgaattaagcgcggacggccgccgcgtccagcagacgcacctgtcctatgacggcaaaggccgcctctccaccctcacagcggaaggcatggaaacgcccttctcctggacttactgcgaacagggagggcttgtggaacaactcgcctaccccaacggcatgacccgggtcaacacctatgaagacagccgcgacctcctctccgtcatcgactaccggaggcccggaagcgccaacccgccggcaaggcacgaatacgactacgacgcgctgggccgtcctacacggcgcagggacacgtggaacacggcggcgcccaaaacgacgcgtttgttcacctacaacagccgcggcgaactggtcggagaccagctcaggcccggcggccgcttcggctatcagtacgacaacatcggcaaccggaaggaagccttcgaattcggcagcaccacggactatgaaaccgacgaactcaaccggtacgcgggcatcgtcagaaatggcggggaagcctttacacctcaatacgacgccgacggcaaccagacgctggtgaaaacttccaccggcatctggacagtcacctacaacgcggaaaaccggcccgtgaaatttgaaagcgaagacggcgggacaaccgtggaatgcgcctacgactccatgggcaggagattcgagaaaaaagtgacggtcggagggacaacgggcttccacgcgcgctacctctaccgggactacctgcaggtggcggagtgcgacttgaccggggaaacgccgaagcttgtgcgcagctacctctgggacccctcggaacctgaggccacgcgcgtcctggccatgacgcgctgggaggcgaacgggacgcaggtgaaggagcatctctactgcatgcacgacgcgatgaagaacgtcacttccctcttcggggaggcgcgcggacgccgcgccctgtacgaataccgttcgtacggagggctggtcacgtcggaaggcaacatggcgcaagagaacaaattccgcttctcttgcgaatacatggacgacgagctcggcctcatctactacaactaccgtcatctcaatccgcgcgacggcaggtggatcagcagggatcccatcgcggaacagggagggtggaatttgttcgcgttcgttaataataatggtatcatcaattttgattatttagggaaaggttacttagctaggcgccctttagcacatacagcattcactcacgacggggaaaaatattatactatacatgggcatgtatacaaagcagaaggattatcaatacaacattctcattttttctttgaggatgaaactaatattggctatttccctgatggattgcatgaggataatagcgaaggtgaagaaagaaaattgtatatcaaaattcgagataagctagatgattgcatattgcgagaagccattaaaaaaacacctcctaaaccttatagcttgactagatttacaattaagatagcttgtgaagaacaaagcacattataccaagtgaataatatggggcaaataattccagtgcctgtaagtagaaatgttattaaaattatacaagtaataaatcctgatacagataattgtaattcatgggcattaagagtattgagaaaatatgacgaattagttaaaaaaatcaaaaaatgaagccgttaattttaacaatatcaggttatttcctagttataatatttataatttttactttggtgtttccagtgtcattggattcaaatgcatggtatgactggatatcatgggcgatgttgattttatcattgattttaaatatattatgtttttttataagtatctattatctaataaagaaacgtaaaatttggacaaatattatagcttgcttactttctattgtttttatgattatagcattttcgttagtttctatagaaactgtaattattattaattgatcttgaaatgaaataattttctacgaattacaaccactcagggactgttatcctctgagtggttgttttttaataagcatatgggcaggagattcgagaaaaaagtgacggtcggagggacaacgggcttccacgcgcgctacctctaccgggactacctgcaggtggcggagtgcgacttgaccggggaaacgccgaagcttgtgcgcagctacctctgggacccctcggaacctgaggccacgcgcgtcctggccatgacgcgctgggaggcgaacgggacgcaggtgaaggagcatctctactgcatgcacgacgcgatgaagaacgtcacttccctcttcggggaggcgcgcggacgccgcgccctgtacgaataccgttcgtacggagggctggtcacgtcggaaggcaacatggcgcaagagaacaaattccgcttctcttgcgaatacatggacgacgagctcggcctcatctactacaactaccgtcatctcaatccgcgcgacggcaggtggatcagccgcgatcccatcaaggaagaaggcggctggaatttgttcgcgtttgtaggaaattctccgattcatgtgaatgataataaggggttgagcgaagatgaaatttgtaatgtaataaacaaaaataataaaactattgatgaagttcgtgctggatttgatcctattttgcaaaaaataggtgatttaattcatatatgggatttgttgaaaaagtttaattctaacccagccaatcataaaggggaaaagataactgttattttaaaaaattcagatttaattattgaaggtgggcgaaattcgtttttccttataagaactcctctcaaagattgcgttagaaaactttgtttttctcgtcgaggttttggaggaagtcggaacaaaggcgaaagaaatcttgccggatctccggcaggaactcccaacgaatttaaaaaaatgaaacctgatcctaataaccctgatagagtcctcatgaaagatcctaatgggaaaactatatcaaaaccaaagccaaatggtttcgatgaattttggaaaaataaacataattagttaatatgaagattaatatttgtcctgaattgtgggaaaagtatcttggcaagtggaatttttctatttttctagattattgtcttgaaataaaaagaaacagaaaatcaattagtattgatatatttgatatattaagagatgaaaaatgtgtgttaattccaattaaattaagtgatgaatacttgtctttttggatgcgtagcagttggacaaatattaaattctcaatttttcaacatttaaaaaatgaaactcttatagtagatttttcggattgtgatatttataaaaagacatttccagtacaaattaaccaatctcataaatatatcgttgattttaacgcttccaaaatgccgaaatggatttacgggacatggcagacaacagatggtttagagtatatgaatataagccgcgacgatactaatttatcaatagccctttggtctgattttggggatattccaccaactcaaaatcgcagttttcgtaagattatttcagtctatgatatagatagttttaatatcaagatgattgtgaaaggatatgattacagtaataagattagagaaatagtaatattattcgattctcatgcgaaagaagtgagattaatttattcgagatcggtagaagctaaacgaatatgaataatgtttagttcttttttatttgatgattttcattataataaattttaaatataattcacttatttttattaaaaactccttccaaaatcatattggaaggagtttttttgaaattatttagaataggccacgacaacactgtcacgactcgaaccgacctagtcggtcgagttgtcagtatgacggacaccgccggaaatgcagccgtaacgagggaatacgcttacgatagcctggcaaggcccgtcacgcggcgcacggcccgccaggggaataccgtcaacgacagctttgcctgcaacagccggagcgaactgaccgccgccaccgtcagcggcaagacatacggctacagttacgacaacatcggcaaccggaaaaccgcgagggaagacgcggaagaagcgaccgcctacacaaccggcccgctcaaccaatacaccgccatcgagcgcggagaagaagccgcctttgaaccggttcacgacgcggacggcaatcagacattgatcaggacatccaccggcatctggcaagtcgcctacaacgcggaaaaccgcccggtgcgcttcgtcaatgaaagcgccaaaaccgtggtggaatgcacctacgactacatgggcaggcggcacacccgcaaagtgagcgtcaacgggacggtgagcagctacctgcgctacatgtaccgtggctacctgcaaatagccgccatagatgccgtcagcggagtcttccgatggttcctgttctgggacccgacgcagcctgaggctgcgcgcccgctggccatccgcaaagacggcacctggtacgcctacgggtgggatctgaccaggaacgtcacggaaatcttcgggaaagccggttacctgcggacggtctacacctacacgccttacggagaagccaccgccgaaggggacgtcacccagcccatccagtggagcagcgaatacaacgatgaagaactggggcttgtctactacaactaccgtcatctcaatccgcacgacggaaggtggatcagccgcgatcccatcgaggaagaaggtggttggaatttgttcgcgtttgtaggaaataaaatttttaatcaatctgatattttagggttgatatgtacaatagaatatagtataaaattacatacaatattaataaggaaggtagataaagatagtaatatacttcgtttaacgacgagtagagttttttctggaaatggtgatgggaaaaataatccggacaatgttggaaataaagataacggtcctataccaccagggaaatactatgtgataaaaagacaatctggaggaattcggagccaaattaaagattggacctacaaattatggaatgataatgataagaatcaatagctcgctttcattgcaatagatgatgcattagacgatcaaaaagaaattaatggagtttttaggtcttcttttcgaatgcattatggaacaagatctttgaggtgtatcacttttttagataaagaagtatttgaaaaagcgcgtgaatttatccttgaaactgaatctagaacagtaaaaggagcagatggaacagaatatatatattatggaattttggaagttaaaaaagaatagaaaaagaattgttttttgtattattttttgtagtataataacatttcttatttttacattagcatgtaaaattataggagcagatgtcatggaggcttgtgttcctgttcatataatgaggatgattatgaacaatttttatccagaaataattattgatggagagatatcctatagtatccttatgtatgatagttttattttttatgggacaattatttttttaataacatttttatgcatttataaaaacaagtccgtgggttgctgtgggaatcggctattctgacgccacgcctgtcagagctttacatacaaccatctcggtcaattgacacaggttgaggaagctagaagcgagtgcctacacaaccggcccgttcaaccaatacaccgccatcgagcgcggagaagaagccgcctttgagccggttcacgacgaggacggcaatcagacattgatcaggacatccaccggcatctggcaagtcgcctacaacgcggaaaaccgcccggtgcgcttcgtcaatgaaagcgccaaaaccgtggtggaatgcatctacgactacatgggcaggcggcacactcgcaaagtgagcgtccgatggttcctgttctgggacccgacgcagcctgaggttacacgcccgctggccatccgcaaagacggcacctgagttggagctatgacaagtggtgcaattggtagtgctggtgccggtgttggtgctgctcctggagctgtagttggcgcagggataggtgcgttaataggaggtgtcactggttggtgggttggtacgtcaattgcagaacatgtatatgattggatattcacagaattagaaaaagaagagtatgaagttgtatgtgcaaaaaattagtttttattatttgtagtagtatattagttatataaaaatgatataatctgcgcattgttttttaatgcgcagattatacttattcgtaaaattttataaaatgaatcgaaaaataaataagtactattttgatattaatagtgaagcaaattatattttttttgaatgtaaaaatggtttgcattatatgctgtccaattcaatatgttcatatattccggagttgccaccgaatgcccgtgaatatccaaacaagtggaattcgcagaaatggaataaatgcggtaaaaaatggatttcttttttatggcagggtttttcctgtgaagataataaatgcgttccttcgcatgagcactattctcatttacatattggttttcagtccagtatggataccctttatttcatgaataatggagcggtaatccactttttcttaaagaaaaaaaaggggaaaaaagagatagaggaaattcgtttttatacaagtcagcaggctgatagaaatggaattcgcatccagaattatctacataattcctcttatcaaaatattcctatttattgggaagggacaggtggtctttatcctcttgaaggaggatttattgtcacaccaagtttttgttccagcggaaagctttgcgatatgaaagcttatgaacttaatcatatagaaaattcacgcagtatcgattttgtgcaaggagtttttagtctggcaaaatatccggaagaaagccgtgcatttagagagcttccttcgtatttctgcgaactggcagattcctcgtttgactataaatcatgggagatggctatgacagcggaatccattcctctggaacacaactgtgttcatccgttttataaaaatggcatatgtatagctgaattggtaattgttaatttaatatggggaacttcttattatccctatcaagattcatatgtacttttgttacgctactctccatcagtagaatcttgtgttatccaacttgttgaccttgtattgggaaaatttcccagtatcagattaatagaaaataaagaaattatatgatgattttgtctaattttgaaaactatttttaatcatcagaagatgatgcgaaacactgaaagctgtcctgatgccaaaaagagatagaaagcttagcagcggaggaaagcagctgtttcagggtattctaaaaatgagatgtcctataaaaatttagaatgacaatttgaatttttatggtattatcataattgggtctaatgtcagaagagaagaagttttgttttttgagtaattatcgatttattaaaatgatataatgaaaaaatatattatatactgtagtattgttgttgtttcagtatttgcttcttttctgttttttgataaatattataagaaatctcctcttctaggagagatcgacaatacatatgtctttagctatgatcctcctttaataataggaaatgtagagattgaggaattgtctaaatttaatcaaacactcgctgatcagtttcccgatcatcatgtctatgccacatactgtggaaaagaatgtaccctgaccgtaataattctttatgattatgatactgatttttcctatacggatagagaaagactgtggaaactaatatgtgaatggcaagacagcttgtggtataaacaggatatggaacaaattaaataaaatctaatatttttcattttatttaattaatacatgaaaactgtttaattttataaaagctccttctgtttatcggaaggaacttttttacataaatgatgattgctttgttttaatattgatttttttgatttttataaagctatgcttcctgtcaaagatattaaccattgtaaaaaagctatgaatctgccaatagttttgagaaaatccttgacgaaatagcagcaatattgaaatcctcaagcaggaacttgatgtccatgtttccagatataaagaatatgatttttagcaaaatattatactttcccttgtttccggtcgtatttttctcatcttgtcaccgaggagagactccggtgatacagtctccgcagccagtacctgtttacgatatggaaaagcttcctaaggcttcggtatatattaaggcagaggaaagaataatgaacttatcgcagcaacagaagcagcaattggcgagttatatcattcattctgcgaattgggagaaaatgttgaagaaagaattcaagcaggtccgcagcggacggtatcaggaaatgttgtccatggtacatcaggatgacgatagttatttaaatagagttattattccatatatccgcttatcgagtaaagataaagatattttatcccttcttcagaacaatgaagacggagaagttattttgagcagagcgaatctttttgaactggtagcggaaaattatatagaacattatcctgatgataagaacggatgggattttttatggttttttatgaatatggaggaagatgaaattccttttggtagtataatcaaagaaacgattatcaaaaggaatctcgatcgattcgcctatgggaagaaaatattggatatgataggcgattcctctattagaaagaatgatggacgctgcctttagttctatagaggggctgacagacaacaaactttggtctgaagcagggaagaatagttgaggatatgggctgagtttgcaaattttctcaactgaaccgcaaatttattgataaatcaggagttgatgaagaaaatttattctgaataatgaatgaaatttattataaaatactttgatagcaaaaagaaatttcatttcaacgaaatatacaagacagctaaatatattaaatcattaattgttatttctccgcaggttctccagatagtttaaattttcaataacagaaataattatggacaatgagaatactaaaataaaaaatacaggatcttggtccccattctactattggatagtaggagtagtgactatgtgtgccttgatgtggatacttcctaacaattatcctagagaaccttgggaaaatatcattagagttttacttggagcattgttcatatttctcttttttgtatgtccagtgtggatgattatttcagcaatacgctattggaagacaaaagattatattcgtgctaccgtggcggtattaattactttggcaattttagagagtgttttatttggtcctctgttaagcattgatttttgatttcactatttgttttctaaaaattctgacgagtgactggaaagaaaaaaggagctgctgaacaataaaattgatcattcccggcaagcaaaaaaattataaatctcagttgaaacggataaaagatggtgattaatataatttttttctggatattagttgtttttggggttattgtcagcttatataattggataatagtttttaactgtgtaataaaatccaaaaattcatcttgtattcctctattgggcggtggagcaattgttttagctatgaatcttcctggaatagatatggaagaatacgaatctattcccttattattggattatggatgcattcctctttttgtccacacgtttttttcctttatatataaaatgttgaagggattatttaaatagagtaaaaaacaattagccaaaaggatcgtttttaacagtttttcatcaagggtatttgcatatagcagagtgcggattgaccgaggaaatgccggattcgtgcgcagttacatctgggacccttcggaactggcggctgtgcgcatcctgtccatgacgcgccgggaagcgaacgggatgcaggagaaagagcatctctactgcgtgcacgagacgatgaaaaacgttacctccctcttcggggaagagtatatggtcgccgtattctgtacgaataccagccgtatggcggtctgatcacgtcggaaggcaatatgggggaagaaaacgggttccgcttctcgagcgaatacatggatggcgaactggggctggtctatcacagtgttcatcggtatcaattcgtttgatatctttggagcggcctcattcctgttggaaatttgtcaacggggattggaaagagataggtattcatgcagagtgagttctgtaaattttgttgaggaagccttttagaattctgtatgggattcaagctgcatccggtatgttccgggtgcagtttttgtgtaaacgggttgagaaagacttgccgttatccgccttccgggaagaacggaaagcgggagcgcagccggaagaattaattttttcttaacaagaagaagaaggaagttaactacccagaatggaatttccggatatattgaggtaatgtttttacattatattaaacatcgtcggtccgttccgggacttcgtatctgccatagcggtttttccgtgaaattttttcagataaaaaagaaaaacggcatagaataatatttttgtttccatatatgttggaatggtttgaatttaaatttcataaaatatcatgatggaatcattgttgggttttatcttttgtctattgagcggaatattctgtttttggctctttttcaaatgcgtcgactggtttgaaaaaatctaaaactgcgcctgtctatgtatacactattatttgtgattagcttaattgtgttcggttatttgatgtatgtcttgatcaaaccggaaaaattttaaccagcaagatgatgaaaacagaaattctaggtattattgcgcaaatcgttcttatggtggctttgagctatcctctggggaaatatattgccaaggtttacaagaaggagaaaacatggcttgatttcatgaagcctgttgaaaggctgatgttccgcctgtccgggattaatccggaggaagaaatgaactggaagcagtttttgcgggctttgctgaccgtaaatctgttctggttcgtatgggggatggttcttctggtcagccaagggtatctgcccctcaatccggacggcaatattgggcaaacgtgccaccaggcgttcaatacatgtatttcattcatggtgaattgcaacctccagcattacagcggggagagcggtttgacctattttacgcagttgttcgtgattatgctgttccaattcattacggcagctaccggcatggccgcaatggcagggatcatgaatgccctcagcaagaagacaaccaaaacgattggcaacttctgggattacctcgtgttgagttctacccgtattttgctgcctctttctctggtagttgggtgcatcctgattacgcagggtacgccaatggggtttgacggaaaaatggaagtgacgactcttgaaggggtggaacaaaccatttcccaaggccctactgcggctgtcgtacccattaaacagttgggaactaatggtgggggttatttcggcgttaattcatcccatccgctggaaaatccgacctacctctccaacatggttgaatgctggtccatcctgattattccgatggcgatggttctggcctttggtttttatctaaatcgcaagaaactgggatacagtatttacggcgtaatgctgtttgcctttttaattggcgtctgcgttaacgtgtatcaggagatgaacggcaatccccgcatagaagagatgggcatcgtccaggaaagcggggctatggaaggtaaggaaatccggctcggatccgcggctacagctttgtggagcgtcgttacgacagttacgtcaaatgggtccgtcaacgggatgcatgattccaccatgcctctttcaggcatgattcagatgttgaacatgcagattaatacgtggtttggcggcgtcggggtagggtggatgaattatttcgccttcatgattatagccgtgttcatcagcggtctgatggttggaagaactcccgaattcctgtgcaagaaagtagaagcccgtgagatgaagatcgcttccatcgtggcgttgctccacccgtttgtgattctcgtcggtacggctctggcttgttacctgtttgtttacgcgccatcgtttgtggaaggcgaaggcgggtgggtcaataatcccggctttcatggactgagtgaattcctttacgaatatacttcaagcgccgccaataacggttccgggttcgagggtctgtccgataatacctggttctggaattactcttgcggtattgtcctcattttgagccgtttcatcccgatcgtaggacaggttgccattgccgggcttctggcgggcaagaagtatattcccgagacgtccggaacgttgaagacagattcagtgacattcagcactgtgacttttgccgtgattttcatcgttgcggctttgtccttcttccctgtccatgccttgagcaccattgccgaacatttgagtttgtaaatacaggtcagaacacgttgattaccgataatatatttatatatttctattccattttctggaattgaaacaagaaatctacgatatgaaaaattccaataatacttccctgttcgaaagggagcaggtacgggaaagcttgaagcagtcattgatcaagcttcatccgggaatgatgatgaggaacccgatcatgtttaccgtggaaatcgccacgatgatcatgcttctggtaaccgtttattccctcttcagtgacgagcaagggtctttcctttataatttccttgttttcgtcattttattccttactcttctgtttgccaattttgccgaggcgattgccgaggcccgaggaaaggcgcaggctgatagccttcgcaagacgcgggaggagacgccggccaagttgatcgtcgatggaacggttaccgtcatcaatagttcccagttgaaaaaaggggactatttcgaatgtgtcgcgggagatattattcccgccgacggggaggtcgtcgaagggttggcgtccattgatgaaagcgctattacgggggaatccgctccggttatccgtgagtccggcggggacaagagttccgtgacggggggaaccaaagtgctgtcagaccgtattaaggtgcttgtcaccgcgcgtcctggggaaagtttccttgataaaatgattgccctggttgaaggcgcttcccggcagaaaactcctaacgagatagcgctaaccattttattggctgtctttactctggttttcctcgtcgtctgcattaccttgaagccgatagcggactattccggaacggaaatcagcattgccgccctgatttccctgttcgtatgtcttattcctacgacaatcggaggattgctttcggcgatcggcattgccggaatgaacagagccttgagggccaatgtgattacaaagtccgggaaagctgtggaaacagccggggacatcagtactctcctgcttgataaaacgggtacgattactattggcaatcggaaagcgacagggtttttccctgttcagggttttgacaagcaggcttttgttgaagcctgtctgatgtcttctgtttcagacgatacaccggaagggaaatcaattattgagcttgggcatgaatatggagtccatatgcgcaaccttcatacggaaggggctcgcatgatccagttcacggcggagacgaagtgttcgggcattaatttgagcgatggaaccgaaatccggaagggggcttttgacaccatccgcaagatgaccgaggaagcgggaaatccgttccccaaagaagctgaggaaattattgataaagtggcgggcaacgggggtactcctcttgtcgtctgcatcaacagaaaggttgttggcgttattgaattgcaggatattatcaagccgggcatagaagaacgcttcgaacgcctgcgcaagatgggggtgaagacggtaatggtgacgggggataatccgagtacagccaggtatatcgcagaaaaagccggtgttgatgatttcatcgcggaagccaagcccgaagataagttgagttatatcaggaaggagcaggcttccggcaaactggttgccatgatgggggacgggacgaatgacgctccggctctggcgcaggccgatgtcggcgtagccatgaacagcggaacccaggccgccaaggaagccggcaatatggttgaccttgataatgaccccaccaaattgattgaggttgtggaaataggcaagcagctactgatgacgcgcggcacgttgacgacgttttccattgccaatgacgtcgccaaatatttcgcgattgtgcctgcgctgttcatgattgcgattcctgaacttgctgcgctgaatattatgcatctgcatagtccggaaagagccatcctgtctgcgattattttcaatgcaatcattatccccattctgattcctctggctttgaggggcgtggcgtacaaacccataggggcaagcgcgctgctgcttcgcaacattctgatttacggcgtgggtggtttgattgcccccttcatcggaatcaaactgattgatatggtcgtcggcctgtttttttaactgaaataaatatattgttatgagaaatttagtgaaatcattgcgtcttacacttgtcttttgcgtctttttctccatatgctacatcctggtgctgtggatattcggattgattgtcggtcctggtggaggaaatgcggaaaccctggttttgaacgggcgcgtggtaggcgccgccaatgttgggcagcaattcacgaaggatgtttatttctggggccgtccgtcccatgcgggtgacggttatgacgcatccagttcatccggcagtaataaagggccgaccaatgaagaatacctggccgacgtgaatacgcggatagattcgtttttggagaagcatccttatttggaacggaatgatgtcccttccgaaatggttacggccagcgcttccggtctggatccgcatattactccggagagcgcctatgtgcaggtgaagcgtgttgccaaagcacgtggtatggaagagggtgcagtgaggtcccttgtcgatcaggccgtggaaaaaccgctgctgggcatgtttggcacggagaaggtcaatgtgcttaagttgaatattgctcttgagaaggctgatccttcagggaagcattaatttcctgattgtttagggcggcaatggcaattccggatttggtgataaattgccgccttgaaaaaatgaaatcaattgcgggcttcatgtcatggtaacgcccgcaattgattttcattttcaaaagattctgtaaaatcaacaagatgtttttaaccgcaggagccgggtgaatttaatatgattgacggaagtaacggagcagagcactttcttgacctgatacggcgttctcgaaggggaaagttcaagatttacattggtatgatggccggagtgggcaagacgtaccgcatgctgcaggaagcccatgaattgctgaataacggcattgatgtcagaatcggttacgttgaaacccacgggaggcccgggactgaagccatgctccggggggtgcccgtcatcccgcgtaaagtggttttttacaaaggcagggagattgaagaaatggacctggacgcgattcttcaagtccggcccgagttggttattgttgacgaactggctcataccaatgtggaagggagccgccatcgcaagagatgggaagacgtgatggagctgcttgacgcaatattaatgtgatttccgcgattaatatccagcacatcgaaagcctgagcggcgaagtgaaggagattacggggattgagatgaaggaacgggttcccgacaggattttgcaggaggcggacgaagtggtgaatatcgacctgacgtccgaggaattgatcggccgcctcaaggccggcaagatttaccggcctgaaaaaatccagattgccctggataattttttcagaacggaaaatattcttcagctgcgtgaactggcattgaaggaagttgctttccgagtggagaaaaaagtggaaacggaagtattcccggcagtttcttccgccagaagggaaaagattctggcctgcatcagcagcaatgaacagacgccccggcgcatcatccgaaaagcataccggatttcctcgcgttacagtacgtcgtttatcgccctttacgtccagacgccaagggagtcccccgaccgcatcaatctggcgtcccagcgccatttgcttaatcatttcaagctggtggccgaactgggagggacggtgaagcaggtgagtgcggaagacataccccaggcgatcatcgcaacgtgcagggaatatcatattacggctatttgcatggggcatcccgcattcaaaatgcccggagccatgttcaagatactgggatataaacaatttctacgtgtcttgtcggagatgaagatagatttaatcatcattgcataaaaaacagaggtaaatttgaaaataaggccggagccggctcttttcacaggaagcaggcatgagattatcatgcttgtcttccctgagcggaacggattgttgccggcagtttccattatagcctccccgggggcgttttccgttaccattcccgggcggtgcggccccttttatttttttccgtctggttgtttgaaaaacagtccaatgttccggtccgccgcatcttcggcagcacctttgttgaaaaagaatgtagaattcccggaggagcagcattcttaaaagtgaaacgataacgttccgtcttccatagaggagcggcggttatcataaacagaaggaacagttatgagcatcaatttgcaaaaagtcattatcgccgtatgtgcggccgcaacggtcagtgcgggattcgcagcccgcaccgagggggccaaactgcaccgattcagcactactatcgaaaaagagaggccgcagttgaatgaagaaacgaaacggttgattgcttcctatcgccggaatccgtccgaggctaatcggtcggctttgaggaaacaggtcgggattaattacgacaaggtccttgaccgaaaaaaggcgaagcttgaagaattgaaacgaacggctcggcatgcgtccaagatacaggaaatgcaggagatcgtggatgaaatggttcaaaacagggaagcgcgcatcgaccaaagcatgcggcgtttcagtgatccgcgattcagaccaggtgcccgcaatgcagatggcgggtatttgccggtgctcggagcttcctggaatgtatcaattgcatatactccggttaccaatgaggattatgccaaattcctgaaggcaacgggaaggaaggctcctaaggattgggataatggcgccatgcctgccggcaaagggaggcatcccgtggtgaatgtttcctatgacgacgcttctgcctattgccaatggttgtcgctccaggataggaaagccgtttatcgcctgccgactgaagaggagtgggagtttgccgccgggcatatgcccaaggatgcggattttaattgcggcgagagaaacgggacatctcccgtggacgcccatgccgcgacatccggcgcctgcggagcgattgatatgtggggcaattgctgggaatggacttcttctccagttgaagtttccaaggccgtggcacacggtaaaacggtcatggcggtgaagggcggttcctggcgttcgccgcggacgagctgcaggactgagcggaaaggagaaggaagggaatcttctttcgctttcagtgatgtcggtttccgggtcgtccgcgaaggttgagggggattccatgcgtttcagtttcttacaggcaatagaatctggctggcagacctgatggaaattccggccgaattggtagatttccctagggaactgcattcttgaaaagtgaaacgataccgtttcagaaaaaatatcaaccctcattgattatcatgaacaagctcatcattcctgcaattattggaatattcggtctggctcccggtacggttactgccaacgcggcggaatcaacaacaacctccttttctgttcaaatactgaaaaagaaaccgaaggcgttgaagtacggcctgaaacacggcctcaagaaaggtttgaaacacggcctgaaaaaaggcaggataaacggcggtaaaaaatagtcgccgccatcttatctgctgccgggcctgcagcccggcagcgttttcccatcaataaggatgttttatcacctgtagtgcggaaacatatctgacttccgtacagctttgatacattgcccatcatgtcttaaaaagtcaacatattgagaagaaaggcgttttatggtaaaatggttgttgtgcggagccgccatgatttccggcatcgtgatcgcggctgagacggaaaatcgttcattccagtttggaaattttgaggtgattgctgttcaggatgctctttcagcgatgcggttcgaattattcccgggtatgccggaagaggagttcctccgcttaaccggaggcgggagggttccttcttccgtgaatgttttcctgttgaaacgcggcgacggaaaaatcattctggtggacgcagggaacggaggaaaacggggcgggatgctccgtaaacttgaacagagcggcgtttttccggagagcgtcgatttcattttgctcacccatatgcacggcgaccacatcggaggattgcttgggaaacatggcgaagccgttttttccagagccctcgtctatgtttccatgccggaatgggaattttggcaaaatggtacggccggaccacagggaaaacaggtccggaaggtgttgcatgcttacggcagccgggtgagaacattccggtttggagaagaagttctgcccggcatcaaggctcttgacgcttccgggcatacacccgggcataccgtttttgagactgattccctgctgattgtcggagatttgcttcatgctgccgcgctccagattccgcgtccggaggtttgcacgatttacgatatgaatccgtccggagcggttcaggcccggcggcgcttttatgagtttgcggcttcttccccgaagccggtcgccggaatgcacctgccgtatcccggaatcggccggataggaaggagtgcggcgggatatgtctatctgcccggaaaatgagaaaggataaaaaagacacggtacaatgacgcaagcagaaacagcatgcccggatgtctggggaagccatttccttgaataccggggaaggcttcttgccctggcccggaggaatttgaatccggttcttgcccggcgcgtttcggcggaagatgtggttcaggaggctctgctggcagcctgcgggaaaatggctttttttgaaaacaatccggagattcctgtctatttcaaactgcggatgattctgttccagacccttacggctatggaaaggaagcatctgcaatgcctcaagagagacgcctgcagggaagtgaatgtgacggatgacagcgtggggtccgctgcccggttggattggaaccggtttgcagatactgtgaccgggcctcttacccgtgccgtcagggcggatcgttatacattgctccggaaagcggtcgaggcgctgcccgaaaacgatcggcagattcttgaactccgccattttgacgacatgtccaatgcggattgtgccgaagtcctgcatattgggccgaaagccgcaagcatccgctatgtgcgggcgctgcagcggcttcggaagcagctgatggagttaaccgagtttcagccatgaaggggaagatttctctggaagatctggttgaacaattcctggatcagtgccgttccggcaatgttcccgatattcaggattttgccggggcgcatccggagtttgcttccgagttgctggctcttcttccgcttgtgatggagatggaagattggagcgttgaaaaaaaacagggaattatgcctccggttcacgattttcccgatttggagggggacgattaccggctgattcggagactaggcagcggcggtatgggggtggtatttgaagcgctgcaattgtccctcaaccggaaagtggccctcaagctgttgtctccgttgctgctgcaggatgccgcccaacgcagcctgtttgagcatgaggcgcatgtgattgccaggcttcatcatcccaatattgtcagaattttcagtgccgcgtgccgtccgggatgttgttattatgcgatggagttgatagaaggcaagagtctggacggatgtgaattcagtaatccgtatgagatagcccgcattggcctccaggccgccagggcgattgcgtacgcccaccgctgcggcattctacaccgcgatatcaaaccggcgaacctgttgctggatgaagcgggggaagtacacgtcagcgattttggacttgcttttctgcttcaggggagaaatgaagttattgagaaggaaggagctcagagcggaacgctgcggtatatgtccccggagcggctggtgcatggagtcaataccttttccagcgatcagtatgcgtttggggtgacgctttatgagcttgttgcaaaatccccgccgtttccggggctagctcctgaagaattgatggaacggatttgcagggaaccggttccgccgttgaagtgcagcgaacccgacttggccgcgattattaacaagtgcgtcagtttccgcccggagtcgcgctatcgaagcatggacgaactttctgaagatttgctgcattttttgaatcatgaaccggtcggggcctcctccccgtctccggccaggcggttgcagctgtggatgaaacgtaaaccggctgttgccgtattgtctttggctgcggccctgtgtgcggccgctttcgttgtcgcgttgggcgccggttatctgcagacggcgtctgcgctgaaactggcggaaaacaatgccgcagttgccgatgcggctttgtcacaagtgttcacccgtattgcggagcagcccccttcacagaaaaatacgcagctgctttcagctttgctgccctattacaggatgatcgccagaggaaaaaatctgccggagtcaaaggtttgcgaggccaatgccgtcatcggggaatgcgcactgcgcaccgggagttatgctcttgcggaagaagcgttccgcaacatgatgaaattcaggaaagacgcttttcccgtcaaccagttggcgacggctttgaaaaaacagggtaaagataaagaggcaacggaacttttccggcaggtggccgaccgctttgcgatgtcggagcgggcggaggatcggtttgaaacgatccgcgcgttgctggctttgtccggttctccggagagtgttgagcgttcccgggcgttcggaatgttggaaacattgttggaggatgatcctgaccatcctgaataccgttttcaatacgcacagcttttggccagaaatccccgccttttccgggagagacgcattcccggcattgaaccgaatgcagccgtgctgctcctccagcttgccgacgcccatccggaacggccggaatacggcctggcgctggtagagctgatgctgaagaaactccggtatgccaggaatttccgggaacataaccagagggaacttgccgatacggtgaatctttccgaaaggcttctcgggcgttggccgaatgatccgcagattatttccggcatggtccggctgcatgcacggtatattggggccctgcgacgcgaaggaaaagatgcctgggcccgaagggaaagcgaccgcctgcagggcatcctagaagttcttttttacaatcccgagatttccgatgccgtgaaagaaagcctgatccgcctccagcttcaacgtttgaaactgttacggcatgacggccggagttatgaaggagaggatctgcggaaaaaaatcagccgggagctgggcttttaccacggaccgatgctccgggtgttccgggaggagttggataaagccgggccggatgatgaatcctccgtcgggaaaagtgaagattccattatttttgaacgcaccaagcaaggtttgtaaattgtccgcttaccggcactcagcaatttgttgtgcgagggggaaaggaaagcgtcccgttccgagcggcgctggtgcagaagaaggcgggtatttgcctccgttgcaggcggagtgtcagatgcgttcctgatgcatctttgttttccgagccagctttttgttccaaggcgcttcctgagataaattgctgtattcccttgttgacttccagttggtggaacccatatgctcggatgatatatcaaaatttcaaccatcaacgtttaatgagcatgtataaacactattctgacggccgccgccgctttctcaaaatgtccgccttattcggtacggctgcgctgatttctccggccattgcccgggcagagggcgggggtgccgattctccggaaaacggcggctttgccgcctcccggagccggacgcttggcaagggctcctgtgccttggaagcttctccccttggcttcggagtcatgggaatgacctacaaccgcagccagtctccctcgcgtgagcagtgcatccggcttcttcatgaggccgtggagcgcggagttactctttttgatacggccatcatctacggccccctgagcaatgaacttctggctggggaagctctttcccccttcagggggaagatcagcgtcactaccaagttcgggcacgaagttattaacggaaaggggacgggccgccaggacagccgcccggaaaccatccggcgctactgcgacgagtcgctgcgccgtttgaaggtggacgctattgaattattctaccagcaccgctttgatcccagggttcccgttgaagatgtagcgggaaccatctccgaactggtcaaggaaggcaaggtgcggcgctggggcatgtgcgaagtcactcccggtacaattcgcaaggcccacgccgtccatcccctgacagccattcagagtgaataccatctcatgcaccgggatgttgaaaacaatggcgttctggatgtctgccgtgaactgggtataggctttgtcccttacagcccgctcaacaggggattcctggggggctgcatcaatgaatacacgcaatttgacccgaacaacgacaaccgccagaccctgccgcgtttcacgccggaggccatgagagccaatatgcgtattgtcaatattctgcaacagtttgggaggccgcgcggcatgacttcctcccaggttgccctgggatggctgctgcaaaaggctccttatatcgtacccattcccggcaccactaaactgtcccatctggaagaaaacctgcacacgcttgattttacctgctctccgcaggagtgggcggaactggagaacgccgtagccgccatacccgtgaccggagcacgctacaacgcggaacagcaaaggcaagtagggcattaacccgatttgtttgccgggacaatggcaatcgcaacggcggcctccgcagaacgtccgtcaggcgttccatacttccggaattccttgttgattccgttcttacggattgtctgaaaaacatttccttctgaaagcattctgccggaagaaggggatgtgttgttgcgtgaagcgagtagcctccatttgcccctcccggcagcaggcccaggcgtcagcaccttcttcaaattttttgtttcaggaaggaatccatccattccgggttcacctgtggcagaggttcgcctttgtcatatgcctcgcagcactggtcgatatactccattttgattttggagtatttcagttcccgaatgcgcgttttcatggcctgatgcccttcctgcaacatgcggtaacgttggcgcaatgtcgaattaccttggcgaaccaggtgaaaaaagcgtttgatttccttgagtttcaatccagaatgcttaaggcaagccagccccggcagttcttccatttccttgcggtggaagacacggcatcccgccccgtttctcgggatgtccaggattccttcttcttcaaaaaaacgcagattggacggagtggtgcctgtcaattccgagacttccgaaaaggaaaggcacatgtctttctgttttccaagttctgatgcgtcttgcatgaagacacgacggctttttcttaggctgcgggaaacgacaatttccgtgtatgggcggggaagccggttattattgcctttttaaggtacatggcattcattttctcaaactgcatgcggccttccgttttttctggagtttccagcagcgctgttccggttccggtgtatttctcatattcctttacatcaaaggttccgggggatatggtccccgcgtttttcagcaaggcaatgattcttttcaactgtgattacagtgaaggcgcccatgcggatattctccgcagaatggcggaaacgaatatggagcagactgccggttacggggaggacccctattgcgaccaggcccggaagctgattgccggcttgtgcggcagaacggatctggatatccatttccttatcggcgggacccagaccaatttcacggtaattgcggcggcgctgcgcccccatcaatgcgtgctgtgcgcggacacgggccatatcaatgtgcacgagtcgggagccgttgaggcttgcggacacaaggtttccgccattccttccccggacgggaagctgacggcccggcaaattgaggaggcgtggcatgcccaatgggatgacgagacccgtgagcatatgcctcagccccggatggtttatatttcccagccaaccgaattgggcaccatttattccaggaaggaacttcaggaaatttccggagtttgccgccggcgggggctgtatttgtatatggacggagcacgcctcggctacggcttgtgcgatgaggacaatgacctggatttgccggcgattgcctccctttgcgatgctttttacatcggcggcacgaaggtaggcgctctgtttggtgaagccctggttctgcggcatgaggccctgaaggaggattttcgttacatcgccaagcagaagggcgggcgtcttgcgaaagggcggcttctgggcattcagttcctggagctgttccgcgacggcctttatttccggctgggcgcccatgcggaccgcctggctgtgatgctgcgggatttttgccgttccagagggctgtcgcttcccttttccagcggaacgaaccaacagtttgtcacgatgcctgattccgttctggaggagctggggaggaaatacggctttgcctatttgcgccgggaggatgaaacccacagcacggtgcgcttctgcatgagctgggccacccgagaggaagacgtgcgggaattgatggcggatatcgcccgcctgtgctgaaatttccctccgtccggcaatgccgggaaactgcggaaagggtcgttccccattcatttgcggagaagcatttttgtctttccggggggaacctgttgagccatgatatggctatgcccttaatcgtgggacaggaatggcggaggagaatttcccgcatgcagtggctgctgaatgccgtgctggcggtggagtgtcttagcatgcctttttttgccgccggggcggtagctgggatggtctggtacggcggacgcaggatgggggctgactggggctggctggcgggaggcgcccttgccgccgcaggtttctttttggcggtgtgggggtggctgcggctccggggtcgttttttcagcaggcgtgatacggcggcctttctggatgaacagcttgggttgcatgcggcgttgagcgccggtgaggaatggggccatgccgtggaggcaggggaaagcgcggtacaggggaatcccgtgctgcggatacgttccgcctggtgcctggcctggctggcgggaggcgcggttcttatggcttgcggggcttttttgccgttgcccgcgccgcaagccgtggggcagcttccggatttgccgcccgttctggcccgggtgggggaggccctggaccgcctggcggagatggagagcgtggataataagagcctggagcctttccgggagcagttggaggatttgaaaagaatgcaccggaatgagatgtattcccatgccggactggaagcggcggatgccctgaaggggaaaacggcagcggccgttgccggattatccaatcagatgtatcggacggattccgccctttccctgctggacagcctgaatggagcgtccagcccggaggcgatgcagtcccttcaggaggcgttgacgggaatggagtcccttgccctgcagccgggcggcatcatgagccgccagctccaggagctgaaggcttccctgccttccctgcagattgatccggagacggcccgccgtctgcgggaacagctggaacgggccgcccagcagctgcggagcatgtgcgggcagtgcggcatatccctgatggcgtctccggatgaccgtaccgtgatggagtccgggcagggagagggaaatgaacccggacgcggaggaacggggcgtggacgcggggacgctccccttgcctttgagatggaagagcgtccccggcttgacacggtttccagacgggtggttcatgaggacttgagccgcgccgctctgggggaaactgcgggggtggagacggcggctccctccccggaaggggctggaaatggacaggaacacggcggccggggggctcgtccggcccgcggtggagatgccgtgtggtctgattgccttactcctcaggaacagtcagccctgaaggaaattttcagatagattgattgttttctcctgaaggccgggagcgcgtaaccccctgccgcggttgtccccggggaagcaggccggtcctggtaaacagagcgtccagaacaaggaggacgcaggcactccacagcaggatgggacggagttggaggcatgttccgggcctcggttcccggaaaatggagggaaggtccatcctttccctgcctccggtccggttcaccaggtccaggaaggcgttgccggattcaggcggcatggcccattccgggtccacctgctggctgacagggccgaaggggataacgccgccgccgatgcggaccgcgccccgcgccatgactccgtgcgggaggggaaagctgcactggaatattcccggctgcaggtgttcccagataccgttttgtgtacgggagctttcttttccggagagttccagggatatttccggcatgcgttccgccaggcgcgggatgttttcctcactgtagtaaaggcgaatccgtaaccggtctcctgccgtgtccgcctgcacggagtatccctgtgggggatttttcctgttgagccaccgggccagggtttggataaggtctccgtagccgtcccattgctggatgttttttccgagttctccccccatggcgaacgtaacggcggccgtccgtcccgtccccctgttccagaaggagaccaggggcgccgcgtttccgtcttccgttacgcaggctgctgttgctccattccttaaataacacaggttataaccgtctacggcagggggccattccggctgaccggctgcaatttgaagccagccggccgtgccgcgcagggaggtgcgttccctgatgaaggcggcccgggccacgctgacggtttcctgtgcaaagatgctggggatatcccccgggcggtcgcagaaaaagatgcgcccccgtcccaattccgctatttccctgagcagtccggcatcggcgcttttttccgttcccagtgcgatgacgcttacggtagccccttccttaaccatttctttcagagtttcccggtagtcggcaggttcttcggaatcgtcggcatctgcaaagaggagcagatgccgtgttccggccacggaacgttgcagttcccgccagcccgctttcagcccggcgccgatgaagatgcctccacccatggaggcaatcctggagacgctggatatcattttcttcctgttagggcccagactgcttagcgtgacaatagggtgcggttcgctgtccacggcgtggacggagatgagatcctggtcggacagcagggaaatggtctggcaggttccggcattggccagatccattttcgtctttcctccgggaacggaacaggacatggagccggaacggtccagaacgatgctcatggccgtcatgagcttcatcttgtccttcttcatttccatggaaacggggagcagttcgtcaatgggggaggagaagtaaccgccggagccaaaactatgcctgcccccgcacatgagcaggcctccgccctgttcccttacgtaatagtccagggcatgcagaaagtccggcgggacggaggatgcggagaggttgttgatgatgaccagccccacgccggagaggtggcgggcatcaagccggttcaggccggacggttgttggacgcggaacccctgcgcttccaggaaaggcgccaggggatcgcggtcgtagccggagagcagcaggacgccgtttcctcccgtcacttcaaggaagctgacggcacggttattttcagggattggatcgttttgcggcgttatggtcatttcataagcggaacagccgggggtggagagcctgtccgccagcctcaccgtggctttgccgttgagcagggtagccgtcccccgcagcggagcccccccgtttttgctgatttgccacggaacggtgatggccgggccgggagggcctgccagggttgcctctaaaataaaggcttcgccgggccggatgcgcgccggggttcggatttgttctatgcggatgtccgcttcccggaaggtgacggacaggcggtagtccaccggaatccgggactggatgagctgttccgccgcctggtccagcggcgtggtgggccagccgtccgtcaacatcaggatgcggtttgtccggttcggggacatcagggccatggtataggccagggcctgttccatgtccgttccggcggttcccccggcaaagacggggtctccgcgtccccggagcacggcggattgcgcgaaatccaccaatcggacgcggtccccggcatgtttgtgccgttccagaatagcctggatttcctctgccccggctgccggaattcccgccgtggaatttgattggtccaccagcacccacaagtccatgtctttgccgcccctgtcaagggcaggctgagccagggccagcagcaggcaggtctgcaggaggaggcgcaggggggaggccaggcgcagacgcctgtatttccagcctgccgccagaagcagggggatcaggaagaaccattccggagtgttgaattgaatcatgggcgcagggaggtgtctgggacgggagggagccaggaaagaatcagggccaggaacgccagcgccagccagaggggggccagagggtcacgtttcatgtgccggagcgcctcttcatggggctggggaagtcctgtgtcaaacgtggagcagtgggaaaaatctcccatccgggcgtcggagaaccagacggagccttggaacaggggcgttttcccttctccgggggggaagatttccacatatccggtttcttccgggagcctgccgttaaagacagtttcacggcgttctccccccggcatggtttgaatgagttttccgcctgcgggcatggataagagagttcctccgggaaggttgccgtaatgtgttccgggcagattctcctgtacggattgcataaatctgcgggtcatgagcaggggcgccggaacgcggtccgcattggatttttcccagggccagttgaggaaaaggcgtttcccgtccacccaggccaggggggattccccctgccagagcaggacgccggctttttcccccggcttcatggaaccgatggaggggatgagcaggccgctccagttcagcccgtcagtcagcggatgccgttccgccgtgacagcgccgtaagatggcttgccgctggctgcaaatatgatggccgcttttccgggggccttggcgttttccgtttttccctccagcaggaggaggtcgggatctgaaccgtccgggacgggggagaatcccggcaggctatggatgatattgaggaagatttttccggattgttccggaattcccatgctgacggcaacgggggcgggagcggagcggaccagcaggagctcattgtccgccgggaaggcgtccgtcgggagccggagcacggcttttccgcattcaggagggaggctgtattcaaattccgtgacagttcctggattcaggaacagggaacgccgggcaggaggacgtccgccttccgtatggatggaaatttcgctccgaagaggggatggactattgtttttaacggcaatcctccaatggccggggccggcggcctccaccggggttattcccgcaaaacccgcattttccagaggtttccctacaccccgtgcggattgcccggcgggaaccctccgggcagtggatgtaatcaggcgcgtgatgcccgttggtccggcaacggctgtggcggtgcgcaggacaggggccaggtcatgtgttccttcgcgcggctgccagagatccagggcgtgcagggcctggcgggcggacggcccccggtagagcggctgtccggaagctctgctgcccatgagaacccatgtggccgggattccggaccggaggatggcgtccatgtcttcggaaacggcattcacggcttcttgacgaaagggggtcatgtttgcggaatcatccagaatgaagactacggtctggccggagcctttgccgggccaggcgggagcggccagaacccaggtaagcaggaggacggccagaatttgcatccagaaggagcgcgatgcgcgcagcctgtcccaggcattaccctcatgggcctccggaaccagcgcttccaacaggaagagcgtggccgtggcctgggtttttgttttatgctggaggaaatggatggcggtgatgagggggatggccagaagcgcccagaacgcggtcgtgttggtgaagtgggggatcatgggcttggggggagagtaaagggtgcgggtgcggttcaggagagttccacggccccctgccgtaatgcttctccggacagggcttccgtcagcgtccccttgcaggggacgcgggcaagaacggtctggcggcgcaggcaggcagaaatccagagttcaaaatgggcggcgtaggcgcgggcgtacctccgggacagggaaggggtgatgagctggcggcgcaggtggccggattcacagtttttgagtctggcgttgccggcggggagttccgcttcttcctgcagcgtgggggccaggatgacggacatcccttttaaggaggccatggtttccagaaggttgtccggttcccccgggtagagcaggtcggagatgaagattttcattccattggggcgccagatggaaatggagggcatggattcatccgggggaaggctctggagctgcgcttcccattggccggagagaacatcttcctggtccagggggatgatacggctccctttcaccgcatgaatcttcacctgggctcccgttccgatggcggagagcaggcaaaattgaagcaggccccgcgtgcgtgccgcgcgctcttcgtgaaaaaacatggattcggaaacatctaccgccacgtctacctgcggtgacagttccgcccggaagactttcatggtgagctggccggttctggcgtacgccgcccaatgaatatcccgcgggtcatccccccactggtaggagcggcttccctgaaagtcgatggagttgcctgctcccgttccctcccaatggccctgtgttcctttccaggcgcagcaggaaaagggcaggcggagacggcgcgccgcctgttcggcgtccggctggatcacctggctggggaaggggaaagaagtcatggggatgggggagaggcaaaacggagggcaagaactattcccgttccctgcgggaatttcccggtttctggagaggttcgggggatgcgttccggaatatgtcaatccagtgtttgctggtgagagccagaacctctattccggcagccaggtccatcaggctgaatagggaaaatttgctgaaagccggcaatgtttcttgtctcaaaagttcagataaataccctccggggagaagggggacggacagattcacgccccacagcacgttttgcaccaggcagaggatgaggcagatcatggtgtacgtcagcagggtattgtttttcagtttttcccagaacggtttcagaagcatggccggcatggtgatggcgtaccagccgcctgctgcgaggcaaaagagccgttgaggggactggaattcggggacggatgccatgcggtctatcagatacacggcgatagccgccagggcgcagagcaacagggtgaacaggacgctccccggcatgccggggaggaacagcagctgctggagcctggagaatcttttgtttttcatttgctccatgtgaatgggaagaaggcgggcaggcgtgttcaggttgataatcatcaggaaaattccgtaaaccatgacaaaaatggaatttccggtcatgatgttttgaatggagccgcttgcgttttccagaaaggggagggggaggatggaggctgcgaaaaaagccagcagaagcttccgcaggggggcggccgtgttttgtgcggcaggggagaaccattcccttgccagcagaagcagggatgagatgaccaggaaggcgtccgccaggacgaggaatatcaggagaacgccttctcccgctccatcccggaaaaaatccagattctcatggctgcctcccagggtcaatataccgatgcccatgagggagaaagcgatgatgcgcatcagggagggcatggcggacgcccacagggtatatgcggtcagcatgccggagcccaggtaaaggaggaaaaacagggttacatcctgtaccaggttaatttccccgtagtaataccggatgagaaagaagggcagggagataaaggcaatcagcagggattgggccatgaaggatatccattttcccagcacgatgcggcctgcgctctgcctggtgagcagcagcagttcgttgtttcgggtgagcagttcgttcctgatggaggtggaggccctcagcggcatgatgaagagcagggcgacgaccatggtaacccagaagatgatctggcatccgtcggggctgacgaagggctccccgtcaagaggattgatgatgaagctgaacaggaagaaaaaggagagcagggagggcactatgctgaccaggaggatgaatgacggcgttctgagaccctggcgcaattccttgaccagagcggagggcatccatatggggaaatcaagagagcgggaggtattcatgaggcggggatggatgggctttcctgggaagaggcgggattctgccgcggggccggttccccgctgccgtggataaggatgtccacaaaagcttcttccagacggcgttcgctgcggtgaaaatcaattacggggaggtcgaggcagagctggcggagttccgcagccacagcttccggttcgcaggagacgaaggcggccactactttctgttgctgtacatggcgcacgttccatccccggcggagggccagccattcctccagtgaggcggtgttgtctccggccgtgcggatttcaaaggcgtatccggattccgtctggcggtgcagcaggtcttccatattgccgtcatggatgacggttcctgcattcatgaagatgagggcgtcgcacatttcccccagttccgagagaatatgggagctgatgagcagcgtttttccacgcgctttgagcagatgcaccagatttttgaattcaaggcgcgctttagggtccaatcctgccgccggttcatccagaatgaggaattgcgcgtcgctgatcagcgtgcgcgccaggcagagccgctgcgtctgcccttttgaaagtttgtcaatcatctggttctggaggccggccagttccgtgaagtccatcacttcgtccacggcgtccagtaaacgttccctgcccatgccgcaggccctggcgaaaaaatccagatattcccggacgctggtgtttttataggggtggaaatagtccggcatccatccgatgcgggaacgtgccagttcaggatgattcacaacatcggccccgttgagcctgatgtggccggagtcaggcatttccagcgtggccagcatgcgcatgagggtggttttgccggctccgttggagccaatcaggccgacgacctggccctggcggatgacgaaggaggcattgttgacggctttcagcggaccgaatgatttggacagtccggaaacttccagcagtaggggcgtactcatggttattcgtgcggctggggagtgacggggccggagacggtgacggaggttttttcccagttaatggaaggcagggtggggatggggcccagttccccgcccgccggttccatggatgcccggaagtgcagcgggggagggccatccggttcttcttccggcaggaacggggatgccttcattttacggccgggaggcagttgttcaagagtccagtattttccggaggcgtcccggtaggtgagtccgttcagggttccgggaaaggtgctttggaatacgggcgccccgccggggctcgtctccagcagagtgagcgccgcccgtgtggaaaccggcatgatgatccggtgctggagcgtggagcggctggtgaaccattttcccccgcattcttccccttgccgcgacgcgccttctatgggtttttccttaatggagccgcgcgccttgctcatgcgtgctccggtgatgccggcgttttccggcaattgaaatgtattgttcagcaggacggaggtcttgcaaatctggttttgggagatcagggcggagtggtcctgcggattaacctggataagaacttcccggctgcccgtccctcccgtgccgtctccggccagaatcaggagcagcagaagaagggaaaatcccacggaaatggccgggatcagcaggaacagcctttgccttttgcctgcgggagcccacaggaacaggctcagcgggccgacaagcacggcaaagatgatcagctccagccccagcgtggtggatggggctgagaaataatagggagcggcggaggtaatctccgggtaacagtttcccttttcgtggaggttgatgaattcctccagtttcagctttttttcttcttccggcaggccgtccagggacggaacgtgcagaatgcgcccgtttcccagcaaccgggtggaaacggaaagccccctgtcaccgatgagccacaggtttccccctcccgtcacccattggcggatggctttgcggtgggcttcgtcaaaatgggtacggtaggttttttccgggatgatgaggcaggtttgcccctcgtacatccggtagtcggctggccatttcatcaggtcgcaggaggaaacggccgcgttataggaagattcggaaagcaggtgccagtccgccggagcgccttcctggataaccgcgaccattttcctgtgctccgtatccgtgggaatgggggaagctccttcatggttttccttcacttcgtagacgagattgtaggagaggggagggtaaacgactgcatgaacgctttcccgggccggaatgaagaacggataagtatggctggttctcctgtttccgttccacccttcatggaattgaagagtggcttttctgtccgagccggtggtgttttccagcttcacccggagagggacgcgggcgccgttcgcgctgtagtcaaatgctttctccacggaaacggcgatggggggagcggcggccggttttgcgtggagcgggagaatattgaattccgaaagaaggaagaggctgaagaacagccatgaacgggagagagggcgacgcatgggggaagggctgaggaggtgtggtcaatgaatttttgcggcggccagggaatccggcaggggcttgttctgggcagggatttccctgaccaggcggttgatgactgcggcgggtgtctgtccgtccagacgggctgtgtggttgagcaggatacggtgctccagcacgggatgaataacggcctgcacatcctcaaaggagcagaaagcgcgcccgtggcgcaaagctcgggctttggcggcagccgccaggcccagggccgcccgggggctggccccgtatttaacgcctccggaggcttccgattctccgggatgcgtagcgttgaccagcctgcctatatagtccgccaccacttcgggaatggctacattccgggccatttgcatgagttccagcaattcctgcgcgttcaaaaccggggatatttcaggttccacgcccatttcccggttgaggacaatgcgggtcagcacatccgccggtgtgcggttgacgttgattttgaaaaggaagcggtccagctgcgcttccggcaggggaaaggttccttccagttcaatggggttctgggtggcaagcacgaaaaagggggaggggagggcatgggtctctcccatgacggtgacgcggcgttcctgcatggcttccagcagggcggactgggtcttgggggaggcgcggttgatttcatccgccagcataatgttggcgaagacgggcccttcctggaagatgaagttttttgttccgtccctttcctgaagaaccggggttcccgtgatgtctcccggcagtagatcgggtgtgaactggacgcggcgcgctgtgatatccagtgccctggagaggcctttgaccagttccgtcttgcccaggccgggcaggccctccagcaggatatgcccgcgagccagtacaccaatgagaaccagttcaatgagatccttttgaccgaacaggacctggttcatggcggcagccagagcacggagcttttgcatggcgcagccaagttcttcctgagaaaggatagggggggtattcatgggaaactgccggatttccgcggcttttgggaaaaagaccgggcatttgttagatttcttcatgaacttatgccatgcatccagaggggctgcaagcagaaagatagcgggacctgttaattttcagtaatatgaagagaaaataccctgcggggtttgagtggtaaatggcattgctgcaatgtatgttccatctgttgaaaaaagaaggcttcctggcatgtattattgtcatgccttccgtatatccccccggcaacgaacgcatttacgtggtggacgctctgcgcggctttgccgtaatggcgatcatgctgctgcattttcttgaacatttcatctacaattcctatcccgtggcttcttccccaatgatggaagcggccaaccagcagttcaaggaggtcttttttttcctgtttgccggcaagtcctacaccattttcgcccttctgttcggattcacttttgcggtccagtaccgtaaccaggcccggaagggaagggattttgcgggcaggtttgtctggcgcatgtgcctgctggcggtgttcgcctgcatgaatgcagcgtttttcccgggcggtgatgttctgctgactttttcacttgcaggtttgttgctggtgccgtgccgccggttgaagacatcctcgctggtggctttgtccctgtttttcctggcccagccgctggagtgggcctatgcggcggtgcagtggatgcatccgggctgggttcctccctccctgtctgttgcggaatcgtacgcttccctgaaatccgccgtggatacgggaaatttctgggtgatggcctgggagaacctgactacaggacaatgggccagcctggcatggggtattgaagccgggcgtttgatgcaggctccgggtctgttcctgctggggtttgttttggggcgccaggatttctttttgcagaatgacggaacggctgtgttctggacccgcggactgctgttttccctggccgggacctgtgcattttacgtggtgatgtgcctgccggggctgccgggacctgtgcataccgtgtttaacatgtggcacaatgtttgctttaccggcgtatgggtggccgggttcgtcctgctgtaccggctggaatatttcaggaaagcgacggctccgctgctgacctacgggcgcatgagcctgaccaactatgtttcccagtccgtgattggctccctgatttttttcccgtatgccctggggatggctccctactgcgggtatctggtcagttttgcggtcggctttgccgccatgaccggacagatatggttctgccgctggtggctggagcggcaccgctacggggtgctggaaggattgtggcaccgggcgacatggctggccgccgggaaggtttccgctccggaacaccggtaagaaacgggggccggcgcaatgatgtttcccgatacttgcgggacgatttttagcgtcttctgtcaaagccggtgatttatccggacggaggatgcatccggttccgcaaggggtattttggagaggagacatggaacagggggcagaggctgggggaaaagggatgaacgtttcatggcggcgggagacatgaaagcgcggtattttttgaagaatggctttcctggagattttttccacagggaacggtctgttttcctggggatggcgtgccgctgccctctccggtccgtgttccggaggcttttccgacggactgatgcaggaggagattccgtaccagatggcgcttttctttaaaggggagatgtagtatggcatggtgtatggaaaggaggacgggcataggcggttttttcgggctggaattgccggagtacggcaatttcccgcaatggcatcccggcaggagtgtagccgtgaattccggcagacgcgctttggaatatatcctgcgccgcctgggggatgtgcgctgtgtccgcgttcccctgtatacatgccggacggtggtggaaacaatggaacggcttggcattcccgtgattacttaccgcattgacgaacgcctggaaccggaggaactgccggaattggaaaagggggaataccttttgtacaccaattacttcggaatcaaggaagaatgcgtggaccgtctggcttcccggtatggcggcagcctgattgtggacaatgcgctggccctgtattctccggcccgttccggagtggcctccctgtacagtccgcgcaagttttccggtcttcctgacggggggatcgccgtgatggatgcggagcggcccttgccggaaccggaggagcgggacgaatccttgccggatgccgcttttttgctggaatgcctggagcatgggcaggaaagggcttccgccgcctgtgaacggaatgaacggcgcttgcggaataccccgctgcgaagggtttcccggctgacggagcgactgatgagcggcattgattatgaacaggcgcggctgctccgcatgaatcatttcctttttcttcatgaaaggctgggccatttgaaccgtctttccgtggaggcggattccttgtccgctccgtgttattatccgttttggacagcttttcccgagctgaggaacgtgctgattgataagcgcgttctgattcctctcctgtggccggaggtattggaacagtcccctgccggcagcttggaacggaaactggcgctgcatcttctgccgcttcctgtggaccagcgctgcgggccgcaggacatggagcgcatcgcccggattgtggaggcattctattcctgaagaaaagggaggattattttgttagacagttggataagacgttgacgatacgtgaatgaatgttctaacatttttggtatgtccgactacctttcctctctgggctatcctttccgtggaaggcccatggtttttgtcttttccgtcatgatggtatggggcgtgttcctggcggcccgggatgttctcatcggatggattgccgccttttgtttcctgctgcctttcatgtgcgcctttttcatgaaaatggtgaggcagtccgccatgggagaagaggatatctgcccctttcctgaactggatgaatggcttgactccctcatgttgccttttgtccggctggtggtgtgcatcatcgtttccttcctgcctttcgccgtgtatgcgcatactgcggcctgggcggcggatactaccctggcgtggctgttcctggcggcgggtgtgatttactttcccggtgtattcatgagaacctccgttcgggaacgtttttccggtctttctcccgtgggctggtgggggctggtcagaagggctcccttttcctatgccgggttacttggcgccatatgcgccgggggatggatcatcctgaaccttccttcagggcctttgatggatttcgccatggtgcccgtgaagctgtatgtcgcctgcgtgttgatgaatatgtgcggactgttcatgctcaagcatgaatttgccggggaggaagaggacggcagcttttccccttccgggcctgcggcctcgtgatgctgccgcctttccggcgggccgggaacaggtgagtttatttggcgggttccttgtccaggttcaggatgcccagtacagacatgttgccttccgcatcttttccggaggggagatagaccttcgcattgttcagcatgttttcaaaggccttggcgcggagcatgttcggtcccatggccttttccttcaatgccagtccttccgcttccgcccgggctgcttccagggctgcttccgcctgggccttgccccgcatgacaatgactttggcctccgcttctccccgggccaggttagcgtttgcttcctggcgcgctatttccattttcatggcgccttccgcctcaccgcgtgcgcgctggatggcgatgtctttccgggcgatttgaagttccgtttccttgcgttcgttttcctgagtcgtctgaacttttctgacgacggattcaatgatggcctgcgggggatttgtttcccccacggctacggaatccacaataaagggggtgccgtccagccgcttgcttaactgcgtgtaaacgttgtcggaaattttttgcaggctgccggaggcgtccagggcattgtactggcttaattccgcccgcacggctgtgcggaaaggctgctgaatgaaatttttgtaggcaaagagcatgatttcgtccgccacttcgtcatcgttgcggccggagctttgggcgatgcctccgtaatcttccatgaattcctttacccgggacgggtccagccggtaaaccagagaagctttgcaggagatggggagcttgtccttgcccaggatagcccctccattgcgggcgtcgaattcttccaccgtggtatccggcgtgatggaaaccttgctgacttcctttctccacgcccatcccgtggaggacggcccgatcaggatgccttcaaacctgttctgtccgaaaatgggtttggaatagacatatccggcaaagccggacaatacgcgcttgttgctgaaattctggaaggcaaaaatggcggcacccgcagcgacgaagatgacggcgggaataagcagggagaaggcggctttgggagatttattcatgacagggcagcggttgtgacggtatccaacataagatgaggctggtgaaaatcaagttatcttttcctgtgcggccgggaaaagtattctactgaagaaactctttccggaagagggaatgcggcaaagtctgtcctcttctgaacacaggggagtgccggaaatgtcttatccggcaaaggctgcctgttccgtggggggattccggcgaggtgccggacctccgccccggaggcgggcctccatttgggttaaggtgatgaatgtagccattacgggatccggaggatttatagggagtcatttgtccaagcgtcttgagatgttcgggcatcgggtgacgcccttgcggcgctatctgtttgcccaggagggcgtggattgtctggcgcaggccctggcgggatgccatgccgtcatcaatctggccggagcgcccatcgaccggcgctggacggatgcctacaagagggagctggtggagagccgcatcatgaccacccgcaagctggtggaagcggtcaacaggttgcatgaaccgccgggagtgatgatttccgcctctgctgtcgggtactatggctcgtccggcggctgtcatggggaactggacgatccggaagcggattcctttctggcggaattgtgcgtggcctgggaaaaggaggccgggctggtgaacagctccgtgcggctggtccttacccggtttggcgtagttctttctccggatggaggggcgctccccgagatgatgcggccggcccggttcggcgttacggcaaccgcaggaaatccggatcatcttttttcctgggtggctttggaagatctggcggatgccctggtcttcattatgggccggcaggatatttccggcccggtcaatgtaacggcgccggagcgcaccaccaaccgggaattctacagggcagccgcggaacatttccacacccgtctgtccatccgtgttccggacgccgttctgcggttgctgatgggagaagcttcccaggtgattaccggcggccagtgcgccgttccggagacgctgatgagggaagggtttacattccaatatccggatatccgcactttttttaacaaagcattttctgtcaaatcatgagcatgatacagaccatcgttacttccctgtttcacggtcattccgtcaaaaccgatcccatgccggatttcaatctggaacgttatctgggggaatggcacgaaatagcccgtctggaaaactggttcgagcgcgggctcagcagggttcttgcccggtatgacctcagggaggacggttccatttccgtggttaacagcggttatgacgttcgtaccggggaacggaaggaggcgcgtgcacgggcggtggcgggggatgcccccaatcatttgaaagtgtactttgtaccactggtatacggccggtatgaagtggctttcctggatgaaaattacacccgcgccgtagtttccggcggttccctgaattatctgtggctgcttgcccgctcgccgcagttgaaggatgacgagcttcagccgatgcttcattgcgcggaaaaactggggtatgatacttcccggttgatttacgccaatgtccaggcctctccggacaaatgacatggggcgggcttgaagaagcggtgtgccgtgaatatgggatatttttgaaatggggaatgtggaaaaggtggcttttctcctgccaggaaaaaatttttgggcatgggccgggcgttcctttccagtgttccgccgtgcgggaatgtcatgcttttgaattctccggtgtggttcttcttcctgcatggctccggtcccgtatttttccgctttttcctgccccgtcctttccgtttttttgcaaagaacagggaaaaacacaggcgcctgcttaaaataggcttgcaatcatgagaaggatggatatgttgacattcatccaaacattggatgtttggatgaattacttaaagaaggagtaacaatggatattattcatgacaacgccgctgatctcagcgcattgaacggcaagaccgttgccgtgatcggatatggcgcccaggggcgcgctcaggcactttgcatgcgtgattccggtgtgaacgtgattatcggcgttcgccccggcaagtcttttgacgccgccgcccaggatggattccaggtaatgagcgtcgcggaagccgccgaaaaagcggacatcattcacattctgctgccggatgaaagccacggcgccgtgtatgaagctgaaatcaagcctcacttgaaggccggcaagacgctttgctgctcccatggcttcgcgtatgttttcaataccatcgtcccccccgcggatgtagatgtcatcatggtggcccccaagggcccgggcacggaagtgcgccgagtatttgaagaagggttcggctgccccggcctgattgccgttcatcagaacccctccggcaaggcccgtgacgtggctcttgccatggccaaggctgaaggcctgacccgcggcggcgtgctggaatgcaccatggcccaggaaacgtatgaagacctgttcggtgaacagaacgtcctgtgcggcggtctggtggacctgatgaagtacggctttgaaaccctgacggaagccggctacccgccggaaatggcttacttcgaatgcgtgcatgaagccaagctcattgtggatctgatttataacggcggcattcagaaaatgaactccgtgatttccaacacggccgaattcggcgaatattacaacggcccgcagatcctgcccgcggaggtgaaagaacgcatgaaggaatccctcaagcgcattgaatccggcaagttcgccaaggactggctggaagaggcagccaagggcgctcccaacctcaaagccaagcgcgaagccctgggccagcacccggtggaaatcgtgggcgccaagattcgcagcctgtttgaaaggaactaaggtttcttttacctggaacgcgtgccgttccgccggaatgcggcggagcggcacggatattcccgggcttttcccggaaatccgccatttgttcagtttatggagcacgccacgccggccgtcaatgtggaaaacgccagggtatacctgggcgggcacgaaatcctgcacaatatttcctggcaggtgcagcgcggagaacgttgttttattctgggggccaacggcgccggaaagacaacgctggtcaaggtgctgatggggtttgcgtggccgctcttcggagccagggtgcaggttctgggcaagaccttcgggcacgtgaacctgctggaattgcgcaagtccattgcgtgggtgagtccgttcatgcacaagtggctggaggatggctcctggaacgggcgcgacatggtgctttccggccccgacggcactatcggcctcttgagggagccgacgccggaagaggaggaaaaagccgcaggaatcatgaaatccctgaaagcggagcatttgatagacagaccggtggtagccatgtcttccggggaacaggtgaaagtgctgattgcccgggctctgatgacgaatccggaactgatgattctggacgaacccagcgtttatctggatttggcagggcgggaatttttattgaaaaccattgaagaactggctgaaacgaggcctgatctgaccatcgtgttcatcacccagcgcattgaagatatccttcccgtatttaaccgcggcatgattttaaagtctggagaaatcgtggcgcatggaagccgggacgaggtgctgacggaggaaaacctgaaagacgcctttgggctggatatccagttaatcaagacggagaaggggcgtctctggaccgttatccgataatttttcatgaagcagtccaagacaatggagctgaagaaaccggtgcgggtgtccctggcccgccaggtgcttaccgccatggaatccatgatacggtccggcaaatggaaggttggagaccgcattcccgcggaagcggaactggcccgtgccttttccgtcagccacaacaccatccgcgaagcccttcaatccctgattcacatggggatgctggaagcgcgccccggggacggcacgtacgtgatggcgtcagaccgctttgccgtcgcggtgagcaaccgcctcaaggaatccgagctgcctcagattctggaggcgcggctggctttggaaaaggaaattgcgcggctggccgccgttaaaaggacggatgaagatttgaaggagctggaaaatgccctggaagactgccacggcagggtaaggcagggcattgaggatgacatgctgtttcatgccgccgtggcccgcgccacgcataatccggtgctctcggaattatataacgtggtcatccgccatgtgcaggagaatctggaaaagctgcttcaggagaagcaatacgactccggcgccatgaagctgcatgacgaccttctcgcagccatcaggaatcaggaggcggatgaggcggagaacattattgtaaagattgtggaatttgacaccgtcagtataggcgggtcatgcccttcttaaattaacggaacaggcgattcccatcatgcggaatcggcatttttttcttttcggcctttttagtaaggccgtccggagaaatgaaattggggaacaagaaagcagaaccggcatgaataattctgaaagaaaaagtgttgcgttttgtattcattggtaatgaaggcgaatgtattttccataatgatgttgttctttcatctgtttccggcatatggaatcgaccccagcgtgaggggatttgaagaacttcatgaagtgttgaaaagtgcggttcgggaacttgataccgttcagtctccggatcatctttctatggctatgaagtatttccgtgccttggtggaggaatgtgggcgtaatcccgatcttgttgccgttcttgagcttacttcagaatcatgtccccctcaactaaaggaggcttataaagcggcaatggagttgcaggggaaattgcatgatgtctctaaacggctggctatgagtggaatgatgcaaaataaagaggaaatcaaaccgtatttggagtttatgcaaaagtttactttaaagaaaaatgctcaaaaaagaacggaaccgcaggtgcatgaaggagcgcctcccgagactgaggatgcccgggacgcaagaatgaaatggtggcgagatggaaaattcggcatgttcatccattatgggttgtattccgggctggcgggggaaattcaggggaaaaaatataagggatgcgtggaatggattatgcagtattccggagtggatagcgaaacatacgccagagaggcccttccccggtttaagcccaaacgcggaaaggctgagacatgggtaaaattggccaaagaggccgggtgcgtttatacaatcctgacaagtcggcatcatgagggttttaacatgtttgattcaaaattcagtgattttaacgttaaaacgaccaagggtgttgatattgtaaaggaatatgcagaggcatgtaaaaaatatggaatgaaggcaggatattatttttcccttcttgactggagccatccggattacgatccgacaggttcaggcatttcttatcctaagggtaactatgaggctcaaaaacaaggacggcggcaattcgggaaccatgaaaaatacaaggattacctttacaatattttcaatgagctgctgaccagttatgccccggtagatctggtatggtgggatttcagccagcctggttttcagggagataaggcgtggaatgcgacagcattgatgaagaatctttttgaaaaaaatcccaaggcaattcaaaataatcgcttgtaccattctgcaaatcatcttagtgaagggggaatcagagtaactcccgcatggaaaggggattattccacagcggaacaccatattccggcaactggcattaatggagattgggaagcatgccagactcttaatggaacatggggatattcagcggataatcaggaatggaaaacatctcaagccctgattcgggagttaattgatacagttagccgcggagggaactttctgcttaatataggccccatgcccgacggatccattcctcctgaaagcatccgtattttcaaggaaatcggtttctggatgaaaaaaaacggtgaagccatttatggaaccagagccaatccgctgaatattgaactgacatggggacgccttaccagaaagggggaagatattacctatatttttgtttatgataaaccggataatggagagctgaccattccctgctcgtttgagggtgatgtgaaagcggttctacttggcggagagaaaactgtcaacatgagtcaggataaaaagtccaataccacgacattctacataaaaaatatgaagatggatacagccgccactgtgatcaaggtgatgggaaaacgcatgattcacaagaggtccgcgtgacccttccgagggagctggaaggggcgaaggttccagctccccattttgaaaatgacattggatcgccctgtgtcacggatgatagtttgccggacaaggcagtaaaaacagccaatgtggtttgttttatattctatctgtaaaaatagaatgaagccggattgtgtaggaagagaaagaccgacgtcctttttttcctgtttttgaaaagtggtattcccatgaatgggatgcgtgtgggaacgggctatgttttttattctttaacgaatatggaagtttgttagagtgcccgatatggctatccacactgaatggaagtgcctggcatgcggcgcctttctggctatggaagatgtgaatatggctgcagatatggtgttatgccgctcctgcaataagataagcaaattttcagagattgttcaggaggaaagggatgaggaaattcttgattccattccccgccgcatgagcgtgacgaaaacggcgagggggctggaaataacgtataagaaaccaaaaggtgcgggactttttctactgatgttttcgattttttggaattctgtaacatgcgttgccctgtttgcggtgaggaaggaaatgtcttgcgaaaatctgttcggactattgtttttaatcccttttgttctggttggggctggtacatttgcgggagctttttatgtgttgtttggccgcatgacgctgatcctgacgccaagcaggggggaattgttccgaggagtaggtaatctgggccgccgacagcattttttgctggagaaagattcccgtatttccatcgaggaaagcagtatacggcggaatcatggaactctgtataaaattgtggtggagcaaccgggaggaaagccattcgagtttggtacgggtattgaggaagcggaggcccggcagtatatagcggctcttttacgacagatgagagagtagttctgccgttccgtaatttcaggcaaagtcatggaacgccggaggatctggtttgcggaaacgaagcgtcagggaatttctgaatgaggttttttgattgatagggcggctaagatacgtagataaacgcatgatgaagaaagagcgccttttgttgattctatgcggtttgttttgcggagcggcagtggcgcagccccgtcttcccacaccgccgaacatgattgtcattctggcggatgacctgggttatggggatttgggctgtactggttccaggcagattaaaacgccttccattgaccggctggccaaggagggtgtgttttgctcccgggcgtatgtgacggcaccgatgtgttccccctcccgcatgggattgctgacggggcgtttccccaagcgttacggcatcacgacgaatcccaatatccagatggattatcttccggagtcccactacgggctgccgcagacggaaaaattgattccggagtatttggccccctgcgggtaccggagcgcggtattcggcaagtggcatcttggccatacgaagggatacacgccgccggagcgcggttttacgcattggtgggggttcctgggcggttcccggcattatttccccgtgaagaaggaggctgaaggcctgaatccctccatgattgtatccaattttacggataagacggacatcacctatttgacggacgatattacagaccgggcggtcgaatttctgcgggaagccggaaaggataagaaaccttttttcatgttcgtttcctacaatgccccccattggcccaatgaagccaaaccggaggatatcgccaaattcaggaacgtgcagaacggggaacgacgggtttattgcgccatggtatatgcgatggacaggggaataggccgcattctggatgccttgaaagcggacggtttggaaaaggataccatcgtcgtcttcctgtcggacaatggaggcgctccggaagcttcttcctgcaatgcccctttccggggtgccaagaggcagcattttgagggaggtgttcgcgtaccttttattatcagatatccggcggacaagcgtttgattcccggaagcgtttgcagacagcctgtttcctccgtggatttgcttcctgctttgctgaaggcgaatggccgtcacattcccaggaagctggacggcatggatattctggagctggtggggaacaagggagcttccgttccgcgcacctttttctggtgtacggattatacgtccgctgtgctggccggtgatatgaagtacctgctggtaccggaccgcgctccgcagttttacaatgtggcggatgatccccaggaacagagggatttgtatttttccaggcaccaggatgcggattccctcgctaaaaagctgggaacatacctgactacgacgcctgcatgccgttttcccgacagtatcagctggtccgccaaattgatgagggagtatgacaagactgagccggacagacagccagagtaaggctgcgttagatttatcccgtatttcgttctgcatgccagcgtttgggaacctcccacgacgggagagggggaggaaccgcgtgcatggttttcttttcccgctgaaaaacgctttatttcaggcgcttgggttccgcaatgcggagaatgtgctctccgggaagggccaaattgcctttatcccgggcaatcatttcaaagtagtggggatcctgtgagatccagataaattcgttttttgcctgttccatctgctcccttgatttttccagatgagcctgaaggaaggaacgttcatgctccagggagcgcagatccttccatggtttgaaacacaccagggaaagcagcatcgtcaggcacagggccaggacaatggcaaagaggcgcagggctctctggacgatcagggcacgtttctcccggcggatttcaagctccgccagggtaaaacggtggtagtagcggcgtctccagagcattccttgcagtcaaacgacacatttttgatcatagaatatgaattttaccaccataaactgcgtcatttcccagttcttcttcaattctaagcaattggttgtatttggccatgcggtcggaacggcttagagagccggttttgatttgccccgcgttcgtcgctacggcaatatccgcgatcgtggcgtcttccgtttccccggagcggtgggagatgatggcggagtatttgttatccttggccagttccaccgtatccagcgtttccgtcagggaacctatctggttgactttcaccaggacggcattcgctacatggcgggaaatgccctgattcaggaattccacattcgtcacgaacaggtcgtcccctaccagctgggtattgccgcccatggctttagtgagctgttcccagcccagccagtcgttttccgcacagccgtcctcaatggaaatgatggggtattttttctgcagttcctgatagtaagccgtcagttcctccgccgttctgccttggccgtctgattttttgaagacgtacaggttccgggagggatcatagaattcggaggaagccacgtccagggcaatgaagatatccgtgcccagggtgtacccggcccgttttacggcctgtgcaatgcattccagggcgtcgtccgctgatttcagggccggggcgaatcccccttcatcccccacggcagtggaaaggccgcggtcatgcagcacatccttgagcgcatggaaaacttccgccccgtagcgcagggattcccggaaagtgggagcccccttgggcatgatcatgaattcctgaaagtcaatgggggagtccgaatgggcccctccattgatgatgttcatcatggggacgggcaaaaccttggcgttcggcccgcccaggtatttgaaaaggggaaggttgagctgaatggcggcggctttcgccacggcgagggagacgcccaggatggcgttggcccccaggcgggatttattgggcgtgccgtccaggtcgatcatgattttgtcaatggccggctgcagggtggcatcgtgccctgatatttccggggcaatgattttattgatgttttccacggctttaagcacgcccttgcctccgtagcgcttggcgtccccgtcccggagttcccaggcttcatgctctccggtggaggctccgctggggacggatgcgcgtccgatagctcccccggcgagggccacgtccacttccacggtgggattgccccgtgagtcgataatttcacggccgcggacgtcgatgatttccatttcattcatgatcataagattttttcttgttctttttagacagggaaacgggtttttccgttccggagaagcatgtcatgtccctggaagttccggtttcaaaagcaggactggcgcagaaggggggatgaagattgccggcgtcttcaggaccataatgccccgcagagtgaaggttttttcttgccgggcatctgcctgcccatttttgggaatcttgcccggaaagaaactcagggaaatcagggaagacaagacgtttggtgaggagcatgaaacgcagagggacaggagcagccgctttggcacggtggaaacagcatcaggggaagacgcaccgtttcgtgacgcagggaaggacggcatgccggaaaggggccttgattccgtcccgttccgggtatggaataaaagcgcttactactaaaaccatgcctaacattaacgataatttcctcaagttgcaggcgggatatttgttcccggaaatagggcgccgcgtacatgcgtttgccgaatcccatccggaggcggccaaaaggctgattcgctgcggcatcggcgatgtgacggagccgcttcccatggcggctattgaagccatgcacctggccgtggatgatttgtccactcatgaacgttttcacggctacggtccggagcaggggtatttctggctgagggaggcaatcgccaaaaaagcctatcaggttcacggcgtgcatgtggaagtggatgagatttatgtttctgacggagctaaatgcgacacgggaaacattctggatattttcgggaccggcaacaaaatcgccgtgccggacccggtttatcccgtgtatgtagataccaatgtcatggccgggaataccgggagttccagcccggatggttcttatgaagggctggtgtatctgccgtgcactccggaaaataattttgtgccgcaattgcctgatgagcatgtggatttgatttacctgtgtttcccgaacaatcccaccggagccgtggcttcccggaatgaactgctgaaatgggtggaatacgcccgggcgaaccgtgccattattctttatgattccgcttatgaggctttcatacaggattcttccattcccagatccatttttgaaattcccggcgcgcgggattgcgccattgagttccgttccttctccaagcaaggaggctttacaggggtgcgctgcggttatgtggtgattcccagggaattgcacggatatgattccgaagggaacaaggtttctatcagccagctctggagccgccgcaccagcacgaaattcaacggcgcttcctatattgtccagcggggcgccgcggctctgttcaccatggagggcatggcccagaccgccgcgctcatcagccattacctggggaatgcttcgcttctgctgaatgcctgccgccaggcgggcatgcgcgtgtggggcggggaaaacgccccttatgtatgggtacagtgtccggatggtctggacagctggcaaatgtttgacaagatgctgcatgaggcgaatgtggttattacgcctggttccggttttggttccaggggggaaggattcttccgcatttccgcgtttaattcacgggaaaacgtggatgaagtctgccgccgcatccacagcctgtttgccagatagaagggcgttttcagacagattgtccaggccgcggtgcaaaacaccgcggcctgtgtatttcttttcgggtgagttgatgaccgtggcattgcatttcctgccgggagggggctcctgtaaaaaggtcatcttcctttcttacggatttggaccgggaaagagcagagtccgttttcaagtgatgggattccggtaaaggggcgttcctatggcatattcggcccttgcccccgttcatttgtacggagtaggttgttgcttatgtccccgtgggtgcgcatgagttcctttttccggcaggctgcttttcctgcatgttgcgcctgcctgctgtctgttgctggcgccatccgggggcaggaaggggaagcggagctcccttctgtggagccgctttcctgcgcgcactccccggatgggagggtaacagttcggggggcggttatgggtacggtgttcacggtgcgcgcttatcccgggagtggcatggacgcgggagatgcggagaggatttgcggggaggctctggcctgtgccgcccattgggaaaaagtgatgtccgccatggatgcggaaagcggtctggcccggcttaatgctgcggaatacggcatttccgtgcctgtttctccggaattggaaagggtgcttcttctggccctggattatgcccggctgacgaacggcgcttttgatcccacgctggggccctgcatccgtctgtggaaaaagagccgccgccttggcattcttccgtccggcgaggaacgggaatgcgcgctccgtgcatgcggatgggaaaagttgtccgtccgtaagggaatggcggtcaaggcggtttctggaatgaggctggatttgggaggcatgggaaagggctttgccttggaccggatggcggagatgttgaaaacaaggggagtatgttccttcttcatggacagcaccagcgatgttctggcgggcgctcctcctcccggggagccgggatggaggctgcgggtggatactggaaatggtcagggggaagtgttgctgttgagccatgcggccgtttccacctccgggagcgcccatcagatggtgaagattggcgggaaatcgtattcccatgttctagatccccggtctggattgggtgttacggaagggaggcaggtaagcgtccgggcgctttccgccgcgctggcggatgccctggcgacggcagggtgtgtgatgtgtgaggagaatttccgttccctgacaggcaaattgccgggagtgtccgtcctgtccttttttcaagatccgccatgttctgtagtggaaatgcagaaacaggatgtcttaaggaaagagggaggaatggggccaatgaaaggaatggcaaagcaactacgtttttaaggtacacctttataaccctatttatgagattgtaccattttttactccctgccgttgtcagcgctgccgtatccgcatcatttggggcagagtttcctaatccctatcctgcgcctgttcccggcgtccgcctgactccagagattccgctttcaccctccattaatggcgcccgtatcgtcggggctacccccggttcccgcatgctgttccaggttcccgtctccggggagcggcccatgaaaattcaggcaacagggcttcccccaggcctgaagatggattcgcgcggattgattgcgggtaccgctccgtccgggaagagggaatacaaggtaaatatccaggcttccaacaggcatggaaaggatatgaaggagctgattctgaaggtgggggacgaattgtgcctgactccgcccatgggctggagcagctggtattcctacagtgaggctgtaggacaggataatgtgctgaagacggcccggctttttgtggaacggggattggtcaatcatggctggacctatatcaacattgacgactgctggcagggcaggcgcggagggaagtatggcgccattcaacccaataagcgttttcctgacatgaaggacatgtgcgacgctattcacgccatgggcatgaaggtgggcatttattccacgccttggatgggaacgtatgccggttttatcggagggagcgcgcccaacgctaagtcggactacggggaaatggccattccggaaaaggagcgcaagcaggaggatcaaatttttggaagttacccgggcgttcatcgcagaaaggcggaccatgtgggagccgtctggctatttgaccgtgatgctaaacaatgggcggattgggggttcgattatgtgaaagtggattggaaccccaacgatgtgcctacgacaaagcgcatccgcaaggcgctggacgagtccggaaaggatattgtgctcagcctgtccaatgccgctccgtacgaacatgtggaagagctgggcaagctggcgaatttatggcggacgacgggggatattcaggatcactggggcagcgtcagcggcatcggtttttcccaggaacgctggcagaagcatatgcgcccgggacattggaatgacccggacattctccagatcgggaagctgggaaagcccaaccagcctaacaccacatttgtccagacgcgattgactccggatgaacagtacacccatgtgaccctgtggtgcctgctgtccgctccgctcattgtttcctgtgatttggagcatattgattcgttcacgatggggctgcttaccaatgacgaggtgatagcggtggatcaggatccggctgcccgtcccgcccgcaaagcgtggcaccaggggaatttccaggtgtggatgaaggagttgtccgacggttccgtggcggctggctttttcaataccgggaaggagaaaggaattttgaaggtgaatctgaaggagctggggctttccggagcgtatgaggcaagggacctctggaaacgcgctgaccaggggaccgtacagggagatatggcggtagaattgaacgggcatggagcatccatgttccggttcagcaaaaagaagtaacgggagggaggcaggcggttttgtattcgttcaagggcggcgggaataggccgcccttgaaacctgggcagaggggtgaatccggcatcagagaaacgagccttttttacaaaaccgcctttctgcaatatctgccggcaggtcaccggatttcaacggggatgcggaatgaagttgtgcatgactccctgcaccaaatattgcacgtcaattccggcaagtattatttgtaataaaaagaaccgctccgggaatctccggagcggttcttataaaagagattgatgtgacttgccttaatctctcccgacagcttttctatgcggcaatgccgaaatgctgttgaatggaggcgaaaatcttgtcgcgacgggcgcgggctttttcaatatcacgggttttcagcgagaatctcaggcgttccgccgtggagtccggcttgtgaaccgtaacgtggcaccaccaaacccccctgttgttccacaggtgatggttggggttgtcatcattaattctaagagcgattttggtttgggctttcatctgtgtgatcttttccagtagaggacgtattgtttacgtccgttggcatattaatgtttcaataaaaccttcaacttggaggtgcctcacttaagcagatgatcccttgtctttttggacatctttttctgccagttgctcacctcgttgaagccttagagttcaagtggtgaaacaacgttcaaaaaaagaatcttttttacaggagacctacctttttaagagtgttgtaagcaccgttcttgttgatcgtacgcagggccttggcggaaatcttcattttcacgaattgaccgagttcaggaacccagatgcgcttctcctgaaggttggggaaaacggtacgattgacagtcttagtgacgtgacgaccaataccgccctttttcttggcaagaccggagcgatggatacgacgacctttgtgaggcatggtacctctgatgatgcaaattcgggacatggcaatcgaagttatttgttaatgcgagagagataatctagcgtatttttgcctaaggtcaagaacaaccggacgaaagccctggaatttatcctggactgtacggaagcatgccttttcttttgcgcgaactccggttttttctcccatgatgaagaggggctgcagagacggtgagctgaaagcgggagggggctgatccgggaaaatgaacggtaccgcagacaaagaggagaatgaggcgttcttccttatttttcaggacttccgctgtgggagcaggggctggccgaatagccgggccggatgaaggcctttcaccgcaggaaaagtgcagaacacgggaaagattgccccctttggttttttcacggcagcggcatatggctgcctgcttccgggtaaaacgtatccggcgcttgcacggaggggtgttccatgagaaagtgaaagcatgagtgagaatcattatgcagagttttccgaatgcagcatgaagccccaggaggtgctggaatacgtttccggccccattcccgttccggaggagggagaagttctggtccggatgaaggcggctccgatcaacccggcggacatcaattttgtacagggagtttatggcctgaagcccgtgctgccgcactcccgcgccggcctggaaggctgcggcgtggtacaggaatctcgcgcagagggattccgagagggagatgaagtgattctcctgcgcggcgtgggttcctggagcgagtatgtggcggttccctccgtgaatgtcatgaagctcccggtgaaggtagatcccgtccaggcggccatgctgaaggtgaatcccctgaccgccctgcgcatgctggaagggatcgtttccctggagccgggggattggctggtgcagaatgccgccaattccggagtgggaaggtgcattattcaactggcccgtgaaatgggcgtgaagacagtgaattttgtgagaaggccagatgaattgagggatgaattgactgcgctgggcgccgatctggtggtgggagaggatgacggggatgtggtgaagaatacgctggcccgcctggatggaaagaggcctgtgctggcttccaatgccgtgggcggagaaagcgccctgcgcctgatggatatgctggctcccggcggaagcatggtgacgtacggagccatgagccggaagagcatcaaggtgccgaacggttttctgattttcaagggtattaaactggagggcctgtgggtgacgcagtggcttaagaatgcccctgtttcagagattgaggccgcctatgacaagctggcgagcctgatggcggccggcaggttgaagcaggccgtggacaccgtttatccgctgagcgatgtgcggaaagctgtggagaaggcccaggaggagttccgcagcggcaaggtggtgctgagcatggattgcgcctgatgcgcggaaaggaagtttttgcgctttcccgtactgcggaatgctggaaggacgttttcagcgttccgtggttaggggagttggctggcggcgtttttttgccgggggaacggttttgctcaggaacagggatgtaaggagttccgcaggagcgtagagccgggagggacggagcgtgcgcgccgtttggtttcagcccagcgtggaatcaagccaggtgttgagtatttccacagcggctacctggtcgatgatggggcggaagttttttgcctttttgccggcggcgtgcagtttttcctgggcaatgacggtggtgaggcattcatccatgaaaatcaggggaaggcctggaagggctgcggccagttccctgccgaatgcacgcaccttggctgcggcggtcccttccgtgccgtccatgcggacgggaaggcccagcaccagggtgcggattccccgtttctggacgagctggacaatgcgggaaattccgtccgtctgatgcctgtggatagtttctacgggatgggccatgatgcccacggggtccgtggcggcaatgccgatgcgggcttctccgtagtcgatgcccagggcggggtgcggactggtcatctgagttcgtctggcagctggttgacgattttcttgatttcgtccgccttgtttttatccgcaatgaggatggcgtccgccgtttccaccacaatcaggttttccactcccagcagggccacgtgcttgtctcccttctgggagaaaacaatgttgccggaggcgtcctgcacggtgatgtccgtgttggtggtgtttttattgtgggtttccagatagttggctacggagatccaggaacctacgtcgtcccagtcaaaggttgcttccatgttcagcactctgtccgcatgctccatgagcgcgaagtctatggagacgggggtgagcgtcgggaattcttcccggatggtttcctgcggggccggagattccgcaacgtgttccacgaaggaggccagttccgggcagtgcttgtccagctgttcgcacacggcgggaatgctccagacgaacatgccggcgttccagcagaaattgccccggctcaggtaggcagcggccgtggccgtgtccggtttttcgcggaattgaatgacttcacggcaggaacagcccggagcggagtggatttcctctccacgttcaatgtagccgtaggaggggcagggccaggtaggcttgatacctatagtgacaagcgctttttccctggcggccgtgtccatggcggctttcatcagggtgcggaaggagtcctggtcctgaatgagatggtcggaggggataacgagcatgactccatgcgggtccgccgccttgatgaggccgatacccagggcgatggcgggcgccgtgtcccggcgcacgggttcggaaatgatgttgtccacgggaatatcgtgggcctggcggcgcacttccgcttcctgaagatggttggtcaggataaagatgttttgccggggcaccagcccgtccagcctgtcgatggcctggcgaaggagggttccttccccgaacatgttcaggagctgtttggggcggtggtcacgggagagtggccagaaacgggttccgctgccgccggccagaataagggcgtattggttcatgtctgtttcgcaggaatgggggttaaaggaaggtcagagagctccgaaacggcgttttctgcgggagtagtccagcagagccgcttccatgtcccgttcgcaaaagtccggccacaacgtgtccgtcacgtaaatttccgcgtagctgatttgccagagaagaaagttggagatgcgcatttctccggaggtgcggataagcaggtccggttccggcatgccggcggtgtccaggtactcgctgaacaggtgttccgttacggcgtccggatggagttcccctcgggagactttttccgctattttcctggcggcggcggctatttccccacggctgccgtaggaaatggccagaaccagattgagtctggtgtttcccgaagtagcttccagactgtcctgaagaagtttccgggtgcgggatggaagacgggagagatctcctatggcgtggaggcgcacgcctttttccatcatttggtggagacgttttttcaggaattcgtgcagaaggagcatcagcgcgcgcacttccgttttcgggcggttccagttttccgaggaaaaggcgtaaagagtgagccagggaatattatgggtcatgcagaagtccgcacagcgctccaccgtatccgctcccgcccggtggcctgcctgccgcggcagatgacggctgtgcgcccagcggccgttgccgtccatgatgcaggcgatgtgaatcggcagtttttccttgggaatggtaagcatagacaggcgttgctcctttactctaatccatgaccggatccagttcaacacgcaagtttttcaggatgtattcctgtctttcccgcgtgtttttgcccatgtagaaagacagcaggtctttcaccttgtgggagtcttccagccggacgcggtccaggcgcatcccttccccgatgaaagccttgaattcctggggggagatttctcccaggcctttgaaccgggtaatttccgggtttttccccagcaggccgatggcttcctccctttctgcgtccgagtagcagtagatcgtttgctgtttgttgcgcacgcggaagaggggcgtctggaggatgaagaggtgtccctcccggatcaattccggaaagaactggatgaagaatgtcatcagcaggatacggatgtgcatgccgtcgtcatcggcgtccgtggcgatgactaccttgtcatagcgcagttcctccagtccgttttcaatattcagggcatgctggaggaagttgaattcctcattttcatagacgactttacggctcatgccgaaggagttcagcggcttgccccgcagggagaaaacggcctgggtttccgcgtcgcgcgccgtagtgatggagccggaggcggagatgccttccgtaatgaagagggttgtttccccggcgcgggagtgcttggagttgtaatgcacccggcagtcccggaggttcttgttgtgaattttggccttgcgggcgttttcgcgtgccagcttctggatgccggagagttccttgcggtcccgttcggaatccttgatttttgcttccagggctttggccgtttccgggtttttgtgcaggtagttgtccagctccctggcaatgaagttgcccacaaaggtgcggatggtttccccttccgggctgatggtgttggaccccagcttggttttggtctgggattcgaagacgggttcctttaccttgatggagatggcagctacgagggaggaacggatgtcccccgcctcatagtttttcttgaagaagtccctcagggttttgacgatggcttcccggaaggccgcctggtgggtgcctccctgggtggtgtgctgcccgttgacgaaggagtagtgctcttccccgtattggccgccatgggtgaaggccacttcaatgtcatgcccttccagatggatgatggggtacaggggttcctcgctcatcgcttccgcaagcaggtccagcaacccgtttttggagatgtagcggcggccgttgaaatgcaaggccagccctttgttgaggtaggagtagtatctgcacattttttcgatatactccggccggaattgcgtggccgctggaaagatatccgggtccgcgtggaaagccgtgcgggtgccgttggattcctccgtggcgccgtcctttcgtcccttggggatttcctttccccggcagaactggtaggaacgcgtttccccgtcgcggtaggcctggatttcaaagaagtcggacagggcgttgaccgccttgatgcccactccattgaggcctacggattttttgaaggcgtcgctgtcatatttggccccggtgttgatttttgcggcgcagtccagcagtttgcccagcgggatgccgcggccgaagtcgcgcacttcgcacaggccgtccggagtcacgtcaatggtgatttttttgccgaaccccatcacgaattcgtcgattgagttgtcgatgacttctttcagaaggacgtaaatgccgtcgtccggggaggctccgtcacccagtttgccgatgtacatccccgggcgcatgcggatgtgttccctccaatccagggttttgatgctgttttcgtcgtaggccatgtgcaacggggtcgcgcttattatagcggcgcccccggaatttgcgaagaaaaaatgaggggccgtccgtctgcgttcgatggagcttgacccggaggccgtcccttggtggaatccacggcgtatgatcagttgcaaggctccgtgcaaagtgaacgtttccctccgcgttctgggaaagaggccggacggtttccatgaggtggataccgtgatggttcccctggatttgtgtgatgtgctggagttttcgccggcggcctgtctggagatgagctgcgacgccccgggcgtgcctctggatgagagcaacctggtcatgaaagcgggccggctgatggaacgggagctgggaaggcccatgccgtggcatgtccgcctggtgaaaaaggtgccccatggtgcggggctgggcggcggcagcagtgatgccgcatgcgtgctgcgcaccctcaatgagctggaacgcggaggtttgtcccgggagcgtctggcggagctgggcggggaaatcggttccgacgtggggtttttcatttatggcgcggcgagccgctgcaccgggcgcggagagaaggtggagcccttgccggactggaaggggtggcgtccccgggttgtcttgttgaagccgtcgtttggtgtctccacgccggacgcttaccgccgctggtccggttccagggaattgcccggcattccctatggggagcaggatgtggacggccatgtgctggtcaatgatctggaaaggcccgtgtttgaaaagcatttattcctggcggaagtgaagcgctggctgatggggcggcccggggtgcgcggcgccatgatgtccggttccggttccaccatgttcgccgtggtggaggatgaaggaaccggacgcgcgctgatggaggatgccgcccgggagctggaccccactttatggatgtggtccggcctggtgatgcaggatgacgcgcggtaaaaacatgattccgcaggaggccttgccttgacggagggggatgcatgccgttacactccgtccatgattaagagtttgttggcaggcatgatggtggcggctgtatgcgccgtccaggccggtgaatatggggacagcgccgtccgggccgcccgggagctttccggggcggtgaagacgggcgacatgatgtggatgattgagaagatgtacccgcccatgaagaagcagcttgttgcttcctttccaggcggggaggcctccttcatggagaccatgagggaaaagatgcaggccgccgccgccgtgatgaaggaacgcggcatggtggtggagacgtatgaaataggccagcctgcggcggaacatctggtgaagggaggcggggaggtgctggtggtgcttcccacgcggatggtcatttccatgaagcgtccggacggggtgcccgtgaaggtggagaataccggtgttctggtgctggtgaaggatttgaaggataaggggccctggacgttcatcgacgcttccagaatgaatgcgaacggcttgcgctccatgttctatgacctgcctgaaaaggtgaatcttccgccggtttcttcccgccagcttcccgtgggccagtaaggggggcaagttcccacatatgaaggccgccggggaagagggcatggaaggcgtcagcgcttttgaggcttatgtccaccgggcatttgccccggacggattgttttcccgcgccagggattttgagtaccgggaggagcagcagagcatggccctggctgtggcgagggcgctccaggtggatgcgccgctgctggtggaggccggcacaggcgtgggcaaatccctggggtatttgctgccggcggtgaagtttgctttggattttgaccggaaggcggtgatttccacgcataccatcaatttgcaggagcagttgttcaacaaggatattccgctgctgcgcaccgccctggggattgatttttccgccgccctgctgaagggcaggcagaattacctgtgccatacccgcctgcggcgtgcgctggcgcagatggattccctctttacgcagggtgaggccgcggagttgaagaggatccaggactgggccctgagaacgcaggacggcaccctgagcgatatggcatttcggccgtcttccaaggtatgggccatggtctgcagcgaaccgcatgcgtgcagcatgcgccattgcggcccttcctgtccgtaccaggcagcccgcaagcgggttctggaggccaaagtagtggtgcttaaccataccctgtttttcgggctgatggcccaggcggaggattccgaggaggcggggttcgtgtttcccggggattttgtgattctggacgaggctcacatgattgagaacatcgccgcccgccagctaggcgtccagctctcggaaccgcatttgagttatgaattgctgcggatgtacaatccgcgcacgcacaaagggttgttgaaaccgctgaacaatccgtccctgtttcagcgggttcaggacgtgatggacgcctccggcctgtttttccagaatgcgcgggatgacctggggtttgcgggttccggaaagattgtccgcattcttcagccggagtggtcgcaggatattctttctcagcctttgatggaactgatcggggaattgaaaacggagagggagaagcaggaggaaaatgcagccgtgaaggatgaactggcggatatggccgcccggatggaggaggcgcaggcttccctgaaggtgctgatggacatgacggaggaaggtcacgtatattgggcggagcgttccggtccggatggaaggaacatgagcgtttgctccgctcccgtggaggtgggagatattttgagggaacgcctgttttccgccggacgttccgccattctgacttccgccacgctggggaccggagatgcggacatgagttattttgcggggcgcgtaggggcggaaagcgttcggaagcttcagattggaagcccgttcaattaccgggagcagatgcggctgattgtagcccgctccatgccggagccggaccagccggagtatgcgaaagttttgccggaatggattaaaaggtatctggcggagtcccgcggcagggctttcgtgctgtttaccagctatcgtctgatggttcaggcggcggagaaagtgcgtcctttttgcgaggaacagggatggacgctgtatgtgcaggggcaggatatgcagcggcatgccatgctggaggcgttccggaaggatgtggacagcgtgcttttcggaacggacagtttctggaccggggtggatgtgccgggagaatctctttccaacgttattgtcacgcgcttgccgtttgaagtgccggatcatccgcttgtggagtcccgttttgagagtatcagggaacgcggggggaatccgttttacgaatattccgtacctgtagccattctgaagctgcggcagggggtagggcggctgatccgcaccaggagcgattccggcatggtggtgattcttgatccgcgcgtagctaccaagaggtatggaatgcgttttctcaagtccctgccggaggcccggctggagtttgtatgaggttttttcaggatgccccggaattgttccgttgcctctcctgccgcatcaggaggtagctgaggggttgttccaggcgcgcttcttccagaagggagcggtctgcaaagatgtcgggaacgggagcgtctgccaggatggaaccgtctttcattacgatgcagcgcgtgcacagatccatgaccatgtccagatcatgggtagcaatgattttggtatgggtgaattggcgcaacaggctgatgagggtacggcgggaggcagggtccaggttagcgctcggttcgtccagcaccaggatgtccggactcatggagaggaccgtggcgatggagacggcccgtttttcccctccggaaagatggtgggtcattttgtctgccagggcttccgcatggacattccgcagggcctgttccacgcggcggcggatttcctccggggggagccccatgttgagcggcccgaaggccacgtcttcccggacagtaggcatgaatagctggtcttccgcctgctggaagaccattcccacgctttcccggacgcgggcgacggttttgggggtcacgggaatgtcccctacccgtacctggccggaagagggggtcagcaggccgttgaggtggagcagcagcgtggatttccctgcgccgttcccgcctacgacggcgacggattccccgtgggtgatgcgcagggaaacgccgttcagcgccggaggggaatccgggtaactgaaacacaagtcaatagtttctacaaggtggtggctcatgggatgaggctgcgggcgtactggcccgcgagcatggtgatgttgaaacagcggaacagaatgacgagaatacagaaaagaaggcctcccgctgcgccacggccagtgatgacgctgcgggaattgacgaattcaggatcttccccgcctctgcacaggacggcctggtaaatgcgttccgcccgcccgaatgtccgcagcagaagttgtccggccatagccccccacgtggaaagagggatgggcccggagcctccccgccgggagcggaatgccatcagcatatgttggcattcatccaccaggataaaggcgtaccggtacaggaaggtcatcagcgtgattagaatgcgcggagcgccgagctgcctcaggccgcggcagagaggcgcaaagcctgtggaggccaacagcgtgaaggcacccaggatggtgagcatgcacctcaggatgatggagatgaaggagatcatgccctgcgtgacgggaatgccgaaccattctcccatgggagttctgtccaccagagggttgaagaggcctatcatgacggcgacgggcagcagccacagggtacgtttcagaaggtagcccaggggaaggtccgccaggcggatgacacagaccgggaacaggaagaaaggcaggagccccgtaatttcctgcggaggccaggaaagaacgcagatttgatagacgaggaaagctccgattttaatgcgggcgtccagacggtggatgccggtatttccgcaggaaaaccgatccatctggcggaattgctgcgaggcgtccgtaaacagtggcatggggagggtcagcgggggcagtggctgtgcggttttctgccgaacaggaaaccggccgcaaaaataagggctgcgataatggcgcttcccagcacgccggccatgctcgtttcagggttgacaatggaggaggaagcttccgtttctgcggtgtttgccccgtcatcagcgggaaaggcgtagtccggcataatggcggtggcctcctgtacggtttccaggttccggtggaggggggacggttccgccagcctggtttcttccgacccggtgactccggctacagaccattccagcccgtcaggataggcggaggcgaaccaggagagggcggctccgcagagcagggccgctaccgcaaagatgcccaaaacggtccaggatgcttttttgacggttccggtttccaagtcggccgggcgcaggagggacggctgtgccttgctgatgaagatgacgacggctgccgtagcaaggccttctacagcgccgatggccagatgaatgggcagcatcaattcaacaaattgggcgaagggcagggctgagatgccggaggccgttgtttccagaacgacggagaaagcccccatctggagcccgatgacggcggcgatgacgctggccagcgtgatacggcccgtgccggtttttgttccggccaggggcctgtaaatgaaagggtaagctaccaggcaggagaaaaaccccatattgaaaatattgcagcccagggccagcagtcccccatccgcaaagaaaagggcctgcaccgtcaggatggccgccatgaccaggaaccccgcatacggtcccagaaggaccgccaggatgaggccgccgcccagatggccgctggagccggtgcccggaatggtgaaattcagcatctggcaggcaaagatgaaggctcccagcacgcccatgagcgggacgagccgcatttctttttcctgcctgaccttacgtgcgcagagcgttgtaattgcagcggaagccgcccacatggtgcagcctaccgccggtgagatgaagccgtccgccatatgcatgatgttgatgcctttctattgaatagtgtgaagtattgctgaaagccccgtaccgggcagattggcgccactttagcataaacgccgcaaagccgaagaaggaaatgcggcaacggaggaaagtatgttccttccgcttctcggttttggttcccgtgcggagccggtaaggcctgtttccggcaaaagagcctttccggagggggaacggaagggagggcgcgtttcttcgggtgcatccggcggcaattcatctgccgtcccgtgccgacaaagggtgtggacgggttgggcgtgatgcaggcgggaaaactgtctgctagacgggacccatgatgaatttttccatagccaggtgtttgttttccataggaggatgcacgacaatcctgggcaatatttccgcagacacggccgtgtcttccgccggagccatcggaggcctgggcgttctgacgattgccgtgaattacacgctgaatctgctcaaaaagaaggatgagcagttgatggcgaaggatgcccgcattgaagccctgatggaccgcctgattgacaaatgcccgaattgcgagctggcgaaagcagccaacaagtccctgctggatgatgaatgacggcaggcgcgggggactatctcccgtcagcgttcgccatgcgggtgtaaacctcccgggttccttccgtgttcagaatcagcgtgtttctgctgagactgtcaatggttgaggtagcggtgaagagggaggaattgccatttcccatgcttttccccgtcaggatcaggcggctgccgtccagctgccagccttggtagagaagcgtgtgcatgttgatggaaacggccctgccgtccggcaggagctgcattccctggacatgcccaggctgcccggggacgggctggatccaggagccggagaggctggcgggagtgggctgcatggagcaggatgccgccagcaggaacagggccgggagaaagagggaaaatttcacggcgagggagttcagcgttgttcccggatgatttccgtgccgatgccgtccggagtgaaaatttccagcagcagggtgtggggaaggcgtccgtcaatgaagtgcactttgcgcacacccgcgttcagggcgtcaatggcggagtggattttaggtatcatgccgccggatacggtgccgtccttgataaggtcgagggcttccgtacgcgtgacggatttgatgagggtggagggatccgaagggtctttcatgattccggggacatcggaaatatagatgagtttcaccggcttgagttccttggcaagggcggcggctgccaagtctgcgttcacattgagcggtttatgggtgcccagttcttttgccagcggagagacgatgggggtgatctggagttccagcgcttccgtgatgcgctccgtcaggcaaccgatgacgttgcccacttcaccgatatctatggggttgccctgttcatctttttcatggatgcgttccccaacgaagatttccgtgccgggaatgcctacgcccttgccgccgtagtcgcggaacatttgaaccagaccgggattgatggttccggaaagggtgcgttccacaatggaaatggcttccggagtcgtgacgcgaagcccgttgacgaaacgggcttccagccctgcctccgccatcgccttggaaatggctttgcccccgccgtggacaatcacggggttgaagcccaggacttccagcagaacgatgtcccgcatgagctttttgaccaggcgggcgtcatccatggcgctgccgccgaatttgatgaggaatgttttgtcccggtaggcctggaggtaggggagggcgccgacaatgacggaggcctgttcaatcaggcgggtgattttggagtccatgtcagtaatgaaacggtaggagttttaacggaaggagagggagattttgaggcaggacccgttcaaagcaggcgcctgcttctgaagtaaaccaggggcaggatgatggaaacgagcatgaccaccagggagatgtagtagccgtattcgttttccaggccgggcatgtgggcgaagttcatcccgtaaatgctggcaatcaatgtggggggcatgaagaccacggccgccacggtgaagattttaacgatttcgttctgttcgatgttgatgaggcccagaacggcgtccagcatgaagttgacgttgctggaaagaaagttggcgtattcggaaagggaagtgacgtcccggctcagaggacgcagcttgatgtacagcgtggagttggtgtcgtccagggcctcttcgttgctggcgtacgtgagcaggcgcagaaggttgaccaggcagtcccgctggcgggtgagcaggtcgcccacgcggcccaggtcctggagcgtcaggcgcagggcgctggagacgggcacccgcttgctggtcttgccttcaggttcgtccctgcggaagatgtttttggaaaggcggtccagttccgcgccgaaacgttccagcacgtccgcctggcggtccacgatggtttccagcaggccggtgaaaacctggtcccggctgatttgcttctggcgcaggagctggtgggaaaaaacgcggaaggaataggagtccgaatggcggatggtgatgattttcgcccccatgaggacgaaggtgatttccgacagggagggggattccgtatccacgcggctgagaaccgtggtggtcatgaagcgcgctccgtcctccgtgtacagacggctggtggcctcaatctcccgcatttcgtcataggtcggcatttccagcccgcagaggcgttccacaaacttgatttccgccggttccggggtaaggaggtcaatccagaagacggaatccaagtgttgttccgccgcatccacctgggtggtgcgctcaatgccttccggggtttgacgatagagccggatcatgccgttgatttcggtggggggatggaacgatgccgtgcatgaggttgagtgacacccaacgcaggcatgatgccttgtttgttcagggaagggaagtaaaaagggtgacaaaaagaggcccggttcccaaggtgggaaccgggcctgccggaaaagggatgcgcgcctcttaggcgttttccttgacgaccaccttgagcgtggcttccacctggggatgcaccttgatgacgacttcgtgttcgccttcgctcttgatcggcttttcgagttcaatcgcccggcggtccacttccacgccctgagcggtcagggcatcgtgaatgttctggttggtgatggcgccgaacgccttgccgccctggcccacttcaagggtgaggtctacggtcagtccgctgatcttggcggccacttcctgagcggcgctgagttcttccgcttcgcgcttggcgcgggcggcctgaagattggcgatgaaacggcggttggaggctgttgcttcgtgggccagacccttggggatgaggtagttgcggccatagccagccttaacggtcaccaggtcggcttctgcgccgagcccttcaatttttgttgcgagaattacttccatcgttgccatggctaaaaagaaatggttatttgtgagcggttgaagtagtaagtattcgcccgaatgtcaagacaagagcgataaaaagggcgtttttttatgttttgggaggaaaaatcctcccggttgtcatgattggtgacattgcgcttgcttcacgcggcagtagtatgtagggaaaggaaccgcatttatcgcgttctctcccggaggggtggggttcgcccgcgggtacattacagatatttgatcttatggctattcagcgcgcattgatatccgtttccgacaagaccggcctggaggagtttgccaagggcctgcacgagtttggagtagagcttatttccactggcgggaccgccgctttcctgaaaggcctgggccttccggtgattgagatttccgactataccggagaaccggagttgtttgaagggcgcctgaagacgcttcatcccatggtgcacgggggcctgctgcaccgccgcgacaatgaggagcatgtgcgccaggctaaggaaaatggcatcaagcccatcgacctggtctgcgtgaatctgtatccttttgaagaaaccgtcgccaggcccggagtcacgctggaggaagctattgaaaaaatagatatcggcgggccgtccatgctccgttccgccgccaagaattacgcttccgtcacggtggtttcggatcccgcggattacgcgcgcattctggatgaaatgcagacccacaagggggatacgaccctgaagacccgtgaaaacctggcggtgaaggtgtttatgcgcacctccaattacgataacgccatcactaattatcttggccaccagagcgcggaaagcaccaagggcagcttctgcatctgcgctcccctgtatcaggaattgcgttacggggacaatccccaccaggaagccagcctgtacggcagcttcggggatattttccaccagcttcagggcaaggagctttcctatacgaacgtgctggacattgaaggggcagccgagctgattacccagttccgccgcccgacggtgggcattttgaagcacacgaatccctgcggcgtgggccaggacgacgaagacctgcgcaacgcatggcagaaggcttttgaaacggatacgcaggcccccttcggcggagtgatcgtggtcaaccgcccgatgacggaaggcctggcccgtgtgctgagcgccattttcacggatgtcatcatcgctccggagtatgatgcggaagcccgcgccattctccagaagaagaaaaattgccgcatcatccgcatgaacacggaagcctggatgaaggcgcgccgcgaacccatcatccgttccgcgcccggcgggttcatgaccatgaagcgggatacggacgtgatggggctggacaatctggaagccaaggtggtgaccaagcgccccccgaccgaggaagaattgaccgccatgcgtttcaactggcgcgtcgtgaagcaggttcattccaacgccatcgtttttggcggtacggaccgcacgcttggcatcggcgccgggcagatgagccgtgtggattccgcccgcattgccgtctggaaggccgggcaggccggcctggatctgaagggcagtgttgtggcgtccgacgccatgttcccgtttgcagacggccttcaggtggcgattgacgccggagccaccgcctgcatccagcccggaggctccatccgcgacgaggaagtgattgccgccgctgacgccgcgggaattgccatggtatttacgggacaccgccatttcctccattaatttgaatgttcgtccccgcccctttgtcttaaaaccgatatgctgctaggtgtaaatatagaccacatcgccacgttgaggcaggcccgctacgcgaccatgctggattccttcaatgtggagccgagtgttttggacgccgcttatgcggcgcaaaggggcggggcggattccatcaccctccatgtccggggcgaccgccgccacatgcaggatgcggatgccctgagcgtccgggagagcgtggcccttcccctgaacctggaaatgggaaataccccggagatggtggattttgccctgcggctgaaaccggactatatctgcatggttccggagaagcgcgaggaaatcactacggaaggcggcctggacgccgtttttcatgaaaaggatctggctccaaccatggcaagaatggctgacaacggcattcaggtgagcctgttcattgatccggaagtgccccaggtggaggctgccgcccgcctgggcgcccccatgattgagttgcataccggatgttttgccaaccattccggcagggagcgcacggaggaactggcccgtttgaaacgcgccgcggaactggcccattccctgggcatccaggtgaatgcgggccatggcatcaattaccagaatctggaacagctgctggctggcatcccttgcctgcatgagctgaacatcggccatacgattgtatcccgcgctctttttgtggggatggagcaggccgtgagggaaatgcgccaggcgatcgaccgcctgagctgattgcgccgtttcaattgatcccggttgccggagtatgagccgcattgcaggattgggaatggatttggcggatatggaacgcgtacgccaggccctgcggaaaaacggggaggcgtttgcgttgcgcatctgcacccctgatgagtgggcttattgccggaagcacgcggatcccgtgccgcatctggcggcgcgctttgcggccaaggaggccgtggcgaaagccctgggaacgggaatcggggcgaagtgcgcttttacggatgtggaggtggtgcgcggcgatgcgggagttccttccattcttttgcacggggctgcgggagtgaccgcccgggagctgggcattacgggctggttcctgaccatgacccattccaggttgagcgccgccgccaccgttattgccttggcgcaataaaaaagccgttccctgggaagaaaggaacggctggcattaaaggaggaaagggaagttattttctccttctgcgtgcggcaaatcccgcgaacgcaagcagagacaatgccgctgtggagggttccggaacagcggcataagagacggagagcgaactcagtttcgtgccgttcaagccgtcattattccaaccgggagcacgatgtccaatgctgtacatctcgttttgggtatctcctccgtccgcggttccggtgtaccagtcgatatcgctgatagaaacggttgcggtgctggcggcagtaccattatcaagagtaacggttacgtcatgtcccaggatatcaacggttacgtttgtccacgtatttgccgtcagtccggcttctgcgattgctcctccgggggagagattgccggagttgatggcaacagccccattgctgagtcccaggctgaagccgaattcgctgcgggcaacgtgaatgatattctcaagggaattgttgcctccccatgagatgtccatggtgatgctcatggtcccctccccggaaagggctccgttcagcatttcccggaatacatttgtaccgcgttcgtcaaaggtggaaccggtaagaaccgtccccttctctgcatcttgggcagtattgaaattacctgtagcagttccccccatgacggcagccgcggaggaaaaatcccatgtataggtagctgtctccgccgcctttgccgcaccacagaaaagcagccctgctgccagcagcaaatattttttaatggatagattgatagccatatgacaatatgcacgtaattgcaaaaagattcaacgattttcaaattcgttgaatgtttttctatcttaacccattaataaataggtttttgaaaatatccctattacaagattggtttctttttccgtttgtttattttcactattccatacagaaaacgagaaaattatagatttttttcttgtaaaacggatttgaaattcgttgctatggaataaaagaggccgccctgtcaaagggcggcctctgccttaagagttttttcttaagtcaggtggacttttaagaaaagctcttaatgaggagctggcgctgttcttccagttcggccgggagcttcttgcccaccttgtcgaacagctcggtctggctttccagttcagcctgccattcgctcgggttgagagccatgttggcgttgaactgttcttcgctgtagtcgaggcccgtcttatccagttcggcataggtcggggagacgcccagcacggtcttctggccttcagccttgcccttggcgcggcgcagaatccagtcgagaacgcgcatgttgtcgccgtagcccggccagatgaagttgccgtccttgtccttgcggaaccagttcacgttgaagatcagcggaggattggcaacggttttgcccatgtccagccagtgctgccagtagtcgcccacatggtagccgatgaagggaagcatggccatcgggtcgcggcggacctgaccgatgttgccgaaggcggcggcggtcatttccgaacccatcgtcgcgccgacgtaaacgccgtgcgtccagtcgcgggactggaagacgaggggcatggtggtggcgcggcggccgccgaacaggatcgcggaaagggaaacgccttccgggttctgccattcgggatcaatcgtcgggcactgggaggcgggggcggtgaaacgggcgttcggatgagcgcacttgcgtccgcaatccggggtccagtcattgccctgccagtcgatggcgtgggcgggagcggggccgtccatgccttcccaccagacgtcgccgtcgtcggtcagaccgacgttggtgaagatgacgttttccttgatggtgtccatggcgatcgggttcgtcttgtaggacgtgccgggagccacgccgaagtagccgttttccgggttgatggcatggaaggtgccgtcatcatggggccagatccaggcgatgtcgtcaccgatgatagaggttttccagccggcttcccggtaggaggcggggggaacgagcatggccaggttggtcttgccgcaggcggacgggaatgcgccgccgacgtaggccttggtgccgtccggggattcaatgcccagaaggagcatgtgttcagccatccacttgttcttgcgggcgatggcggaggcgatgcgcagggccaggcactttttgccgagcagggcgttgccgccgtaaccggaaccgaaggaccagatttcttccgtttccgggaagtggcagatgtacttttcttcgttgcagggccacggcacgtcaacctggccgtccgcaagcggagcgcccacggtgtggaggcagggaacgaatgtcccgtaaccgtcacgcttcgggttgccgccgcccttgacttcgtcttccaggcgcttgagaacctgttcacccatcttggtcatgatgcgcatgttggtcacgacatagggagagtccgtgatttcaatgccgattttggccaggggggagtccagggggcccatgcagaagggaatcacgtacatggtacggcccttcatgcagccattgaagaggcccttcagtttggccttcatttcaacgggatcagcccagtggttggtcgggccggcgtcttcttccttctcgctgcagatgaacgtgcggtcttccacacgggctacatcggagggggtggaacgggcgaggaagcacccggggcgcttctcggggttcagtttgataaaggtgcccttttctaccatcatgttgcaaagctcgtcattttcttcctgagagccgttgcaccagtagatggagtcgggttggcaaagctgggcgatttcttcgacccacttcttagctgcttcgtgagtggtactcatggtgaagatagtgtatgcacggaaatagccgttggcaagcctcccgtgcggctttttatggggcggttttgtttctccgggcatgaaaaccgcatgcggggaaaggcgttgccctgattgccggatggctgtgcgcgggggctttcttcaggatatccctttttcctgctgccgtgtttcggaaagggtgaaaaagactgttttgactggaaatctgcttgccagctcgtctgcgatagtctagggaagaatcatgaatgttagaatgttgtcggcaaatgcggtgtttctgatgctgccggctttgctggcggcgtgttcggacgccccgcgcctgcccgccgtcagcttcaggattcagaatgtgcctcccgtgccgcgcacgatggcccagatgtccagagaggtgcacattaaccgtgatttcatgtccccgcgctcccgtgctcgccgggccgcccattccatgcatccgcggtttatcacgattcacagcacagccaatcccaagggtgacgccgcggcgcatgcccgggcattgaaaaggggggccatggggtccctgaactggcattttacggtggaccagtaccgtgccgtccagcatattccactgaatgagacgggccgccacgcagaccggggcggccccggagacatgtactccatcggcattgagatgggggaggtaaggagccataaccccattgttacctggaaccgctccgccaagctgacggcagtgctgatgaagcagtaccatattccgctccgtaatgtggtaccccattattattggacggggaagaattgcccggccccgctgctgaccaacggccgtccgggacataaatggagctggttcatttcccgcgtggattattacaggcgctgtctggagacacggcccgccgcagcgctctgacgggtacgcgcacatggtgcatgataagggatacgttcttgggttcatggctggagaattgcttttaacgtcttctctggaggaatgcgtttttatccgccccagagagttggcggccatgcaggcggcgggaatggcctccgtacgggatttgttgttcatgcttccgcgcaggtatgaagaccgccgcatgtttgaccgctatgattccttgtcttccggtgtgcccgtctgcctgagagggagggtggtggatgtgggctggaaaggctggggcggacggggcggcaagggccgcggccggtatgtggaagccgtgctggcggatgagcagtctttggggcaggcccgtttttcctgcctgtggttcagcatgccgggcgtagccaggatgttgtgcgccgggcaggagatgattgtatacgggcgcatgaaaccgtatgggaaaaagctcagcatggtgcatccggattttgaaattatccgggaaggagatgagcagtccattcatttgaaccgcattgttcccgtgtatggcggccgcatggggattgcggtccgcaggctgcgggaaatcgtatgggagacgctgtccaggctttccccggctccggaaccggaggtgtatgagtttgtgccggacactccgtgcaaaacggcattgagggatcttcattttcctgagaccgcagaggcccgggaccgggcgcggcgccgttttgcgttggaggaatgccttgctcagcagttgaacgtggcctacagaagaaggcgggcggatgaagtgcccggcatgcggaccgcaggttccagccatttggtgaaggatctggcggattccctgccgtttgagctgacggaggctcagaagcgctgcgtgagggagatttaccgggatatgaaagccccccgttccatgaaccgcctgcttcagggggatgtcgggtccggaaagacgctggtggctctgtgcgccatgctgctggctgtggaacacggttattccgccgtgatgatggcgcccacgcagattctggcggaacagcattatttgaagttccggcagatgctggacaagctggatgtgcctgtttccctggtgacggcggacaggaaggaagaatcccatgtgtcgttcgggaagcagggcgggattgtggttggcacgcatgccttgctgtacgggaaaaatgtgccggagcgtgtggggctggtcgtgattgacgaacagcacaaattcggcgtgaatcagcgggagaagctgattgaccgggaagagcgccccgacgtgctggtgatgaccgctacccctatcccccgcacgctgacgctgactttttacggggagcttgacgtttccatcctggacggcgtgcccggggggcgcggggcggtcgtaacagccatccgtacggagaaggataagggaaaagtgctggcattcgttcggaaccagctggaggaagggaggcagatttacgtggtttcccccctgattgacggagaggattcccggaaggggaaagccgtgacgaaggaatgggacgagtggaaggctctgctgcctcatgtggatgtggggctgctgcacggcaggatgtcttcagaggaaaaagaggcggtgatgaaggatttccgctccaaccgcatcagcgtgctggtgtccaccaccgtggtggaggtgggggtggatgttccgaatgccacggtgatgatcatcaataatgcggaaagtttcgggctttcccagcttcatcagctccgggggcgcatcggccgcggatcgcacaagtcctactgcattttgatgacggacgcccgtccggaggatgagcaatgggagaagctgcgcatcgtggaaactacggcgaatggatttaacctggcggaacaggatttgaggctacgcggccctggagacgtgctgggtacgtcccagagcggcctgaagggcgtacgctttgaggaatggctgctggatgcgcgcctgattcaccgcgggcggcagctggcggaggctattctggcggaagatcccaatctggaatccgccaaataccgccctctccgttttttgctggaagacggggcggggaggcgtgtggccgggtaagattgtttttctgccgtttgctgacggtcagcttgtaagaggcgcatgacagataagagggcaacgatttatccgccggaatgaatctaaagaagcaaagaagatgtttcttcttcaacccgaacaccgataaaacaatgattcaaacgtatcaagtactccctgtggtggccatcgtatgctccgcttccgcctttgcccagaacgctgccgatcccgtgcagatggtcaagcagaatatcgacctgatttcttccgccaacaaggttttggacgacgtgaaggacaacgctgcggttgaaatcgccattaagcagctcaatgcgttgacccagcaggccaagcagctggacaagtccatggaaaagatgaagcttacttccgagcaggctatccgcatcaccaaattgaacggagacgcccaggacaccatcgtggatatgctggaaaattgcgagcgcattcaaaaggacaagctgatgactccggctttgctcaaggcggtgaatgattttgccgacgccgccaacatcgacgtggtggaaacgattacgaccgtggagcaaattgtggaagattgagtgaccagcttatcaaaagacctttgactggtaaggccgcctcctgaagaaggcggccttattttttaaggaagggccgttttttatcaatttccgggcagggcattttatttctccatggccggattggggtttcttgccggaaccaggtagcccgtgccgggagacgtgcccaggcaggagaggagatcctggtggcgcggcagggacttggcgcggaaaacggctgcggcggggtccagcacattgccgaaggtgatggctcccatcgggcatgcgagctggcaggccgtttgagccgccccgtccggaagcagcatgtcctgggccgtcacatggatggaggtggatggctggcccggatgttccttcatcaagcgggatttgtgccggattttggcacgttccaccatttggacgcagtaggtgcatttttccatgacgccgcgggagcgaacggttacgttgggattgcgctgaaggcgcgtggcctgttccgatgctttggcgtaatcaaaaaaattgaagcgccgagccttgtacgggcagttggtggcgcagtaccgggtaccccagcaccgggcgtacaccatggcgttcaggccttccgcagtatgcacggtggcattgacggggcatacggattcacatggggccctgccgcactgctggcaggccacggggatggaggtgagcgtcccttcctccgtgaagtatctgtcgatacgtatccagtccagggcgcggcccctggccatctggtcacgccccaccacgggaatgttattttccgcgcggcatgcaatcatgcaggcgttgcagccgatgcaacgggacgtgtcaatggccattttccactggtaaacggcatccgcgccgggagggggaggcgggaggcgggacggaccgggatgcagggagaacggggcaggctgcacaacggggctctgaatggcttccgtccgctcccggagggcagacaaggcaatctgttccggggcaatgccgtatgcttccgttttttccacctgtctgcggagttcatatccgccggaattttcctgcctttccgctacgtggttgatgccgccataacccagaggaagaataatgagattatccgccactcccggaatggggcacaggatgacttccatttgcgtggagggggcggtaagcgtgcagtgcatgggcccggaatccgaacctcccagccgcagaaaggtggcgggggaaacctgtgcggacgccgcccagctgacgcctgttattgggtccgggcattcctgcatccatgcattgcgtttccagcgtccgtccccaatggaatagtccgcgcggaattgcaattccagcatcccggttcccaattttttcccgtggccgccaaaaggcgctgcgggcgtttgcatcatggctgttccaagagccgtttcttcctgcgggaacaggggagcataggccgtttcttccgaataaccgcgctgaagcgcctgagcccaggccgcagttttattttccggattcacggcgcgttcaaagcatttgcgtgctctgtggtaaacgggagagaggtgggtgggggaattgtccgctgtggagagatggcctttggaggaaagcaggccggaaagaacttcttccggagaaatgcccccgtacaggggaagaatgacgggctggcgatagcaaaatctgccctggtaatcccgctccactccccatgattccagaaagtgggctgccggcaggtgccagcggcagacgcgggaggtttcatcttcatacattccaaggtggatgctttccactttgttcagggcttccgacagtccggaactgcgcccggaatccagcacgggatttcccgcatccagtaaaaaaacgatttccacctttttcccccggatgtcccgaacaagatcgtccagcgcgccataaggggttgggcgcggagcctttaacaactggatgcatgttcccatggagccgagaagacagttgagcttccagacaatgccggataattccggatgattgtcccccaggaggacaacgctttctccggggtggctgaataagtcatccgcacagtggcgaagccagttgagttccttttctgtcaggggatggtccgtttgccggggagggggaagcgtttggccggagttttttttgctggaaagatagcggaacagttcctccaggaaaaacgccaggcgtgcaggggaaacgggcagtctgtggtcggcatgggccccggtcagggaaacgcggccctccacggcgtaaaggcgtgttcggttcctgttttcttctttgtagtaaagcccttccggggagcgggacgcaatgaagtcgcgcgtgtttccataggggttttgatgaagaaaatcgcaatccagggagaggatgcgcctggcgcgcgcaaaacgcacgcggaaccgtacttcttccggcagccccgcctgcatgccggaacccggttcaggcacgggggaataccggtagatgcgcacgagtgaatttttcctggtgatttcctccagcatggaatggagcagaggagaagtcgaggggggaagaagaaggccgatgccgccaccattccgaagattgcgggaccaagaagaaaaggctccccggaattcgtcttcggaggccggcttgccgttgaacaggatatgcttgctgcggccggggtcgtaaaggtccagaatggaggcttgagccgcagccggcagccccgggccttccgggtattgcagggagggaatcaatttgacggggcgcccttcataacaggcggccagtacgggttgcgcgtttcctcccatggtcaggcaggtggcgtaagccgtttccacgccgggaacagaccattcaggcccttcgttatagggaaccaggtatttttccacacggcggcaggccggcagccctatccccgccagggctgcccctgcacccatccatttcatgaaggaacgccgcgtcatcccccgttcttcttccggaagaaaagcggggtggttctggggaacttcattctgggaaaatggagggaggggagtcaaaccgggtaatgatggggattgatgaaacagggatggctttttttaggaaatccgaaggatgaaatcaagtggtgattgacggcggcctttatctccgggccaataacggataaacagggaacaggaggaaatctttcttgtggaattcaatgtcattgattacggattcaaggaaggaatcatttaatgaaaagccctttggtctttttatgacgcagcatccgggaacgcaaagaggaataactttggagccgcggatgtcaaacaggccatggaggtcagtgatggcatgcggtgcaatccgtcttcggctgaatggtccattggcgtttcaggaaatttcccagttgaagcggggtttggatgctttttccttcttcatcccggatggaatgcgtgcggaggtaatttgcggcggaataatgggaactggccgtttcttccagcgggcgcaggtggggagccggattgcggtggcagtccagacaccattgcatgcgggcgtcgcgtggagccctgatgcgttccatgcccgccacgtctccatggcaggacgtgcagccgatgccccggttcaggtgggccatgtggttaaaataggcgtgaccggacaggcggttgaccatcacccagcggaccggttctcctgtgtaaccggggtattgcgggtccgccgcctccctcaggggggcgatgagcggactgtccggaagaatatgctggtggcagcccagacaggacttcgtatccggaatgccggctctgggtgagcgctgtgcggcgctatggcaagccgtgcagctcatcttcagatctccggcgtgaagtttgtgggaaaagcggacgggctgcatgggttcatactccggaatactgaaattaacataatatattcctcccagtacgaatgcggcagcgagcgcaaccagggcggcaatcccgtaaaagcgcttgttggtattgggtggaaagatgttggccatgaaccgtagagtgaaagggctggaacctccgtcaggccgttctgcccgggcgcgggatgcgggcgggcggcaggggcgtatccatcgtcaggtcttcaggcatcagccgtgcggtactcttcttaatctgttcccaggtaatgcgctggcctgtgtgggccgcttcacgccccatgatggcagccagggttttattggccgcgctttccagtgtctgggtccaggtgccggagcgcaggaaacggtaaaaggccacatgcgtgtctgcgtacatattgccgcgttccccgcggaaacgccagcggttattcgcctggatgtaggggcggtagggagtaaccagcattcctttttcgcaaatggtgcggtccacgatttccccgtggcagccaacccactgtctgcatgaaatgtgggccgttacgttatggtcgtactcaaaataaacgtcgtaatgatcccatacgtcgccgtcatcccggcgctgagcgcgtcctccggagccgaaagccgccagaggaagctgctcgttcatggaccagaccatgccgtcaatcgtatggacgatttgttccacaaactggcctccgctcagccagttccatgcggtccagttgcgtagcgcccatgccacgtccgtatcggaggaaggtcgggagtccagggccagcggagacttgggaggagtggtgtaatataacccgtcaaaggagaggacacggcccagcagcccggaagaaagcttgcggtgggcttcctcattcgccttgtcgtagcgccagcagaagccgtccagaatcaccagatttttgagttttgccagccgtgcggattccagcacggaaagcacgccgggaacgtccaccgctacgggtttttccgcataaatatgtttgctggcgtcaatggccgccgccagatgttccggacggaaagcggggggagtgcagagcagcaccacgtcaatatccgtttgcagcaatctcttgtaactgtccaggccgctgaacagacggcttctgtccagctgggctcggttgccgtactgttccgccagtaatttggcgccgaaatcgatacgttcctgaaacacgtccgccagcgcccagaccatggttccgggatcggcgtccagcgcattcttcatggcgcccaggccgcggcctccgcagcctaccaggcccaccttgagcggttttgtgtccgtaaaaacctcagcggcgttcagacagggcatggctgccagaaacccggccgttcccgcggcggttttcaaaaaacggcgtctgttccaaatagggtaacccatctcaggggaattatacggtgacgtcctgtgaaatcaaacgtcgtattgaaatggtgacacaaaaaataggcgcaaccgtcattctcggaaatggtgctctgcggagggagtcaatgaactccctatattttgcctattaaatgggaagggctgtttcctgcgttcagaacgagaggcagaggttaaagagatatgttgcctgaaaaacagtttttaaggataaaaactgatttgactccggaatcctcagtgttcatgatgaattcaatgaggcctccggcttttcaaccaaccatcatgatgaagcgaaatctcattccttttacggcgtttttggcggcgttagtgtttgttgcctgtgacggcggcaagaagcaggatcatccccgggatgtttcggttcccagcgaacaggccgttcctaaaactccgggagaaaaaattctggccgttctgctgcttattcaggatcaggctacggcaaacgcccacgcggcggaggtgaaagagctggctgcctccctgcccggggatattcccaatgaagaagccgtaaatattgcaaatgaattgatgcgtctggccagccgggagtgttatggttcttcgtctctggaagatgctttgaaaggaattcatttcgataccggggaatacacgggcagtgtgcctctggatgtggatggatttgaacctaccgcggaagagccgtaaaaataaattccccgtgccgggaattgggtaattactacaatgttcctcttcattccgttttgccggaatgaagggcggtttgatatggtatcaggtcccccggtaaatcctttcctcttcctgatgggaaaatgcgcgaagagaaggggaaaatatctgtacagcccgactcccggagttttcttgctagagaacaaagggccacgggtggtaaactcaatccagggggcggcgcaattcttcaatggcttccgccatatcttcccgagtaattttcgtagaaatgcctgcctcccctgctttggaaagcagaacaaagcggatggttccggcccggaactttttgtctgatgccgttttttgaagaacagttgccgtatcaatgccgtccggaagaaccaagggaagttccagcgcctgaagcgtgcgaaggatcttgttggcatcggaagaacttaaaccggctttccgttcactcagaaacagggcggcgcgcatgccgagcgccactgcttccccgtgaaggatggttccgtaagggacggcagcttcaatgccgtggccgatggtgtggccgaaattgagcagagcccggatatccagagtttccaattcatcattttctacaatgcgggccttaatggccacgttccgggagattaggtcaggaagcctggcaatagtattcagggagaagccgatggagagttccggccccagccctttcaattcatgaagcatggaagcgtctttgatagctgcgtgcttgacggcttccgccaaaccttccgccagcgtacgtcgatccaaagtcaccagcgtggtagggtcgattaccacgacggacggctgatgaaaggctcctacaagatttttcccttctggaatattgacggcagtctttcctcctacggaactgtccacctgggcgaccaccgttgttggaatttgcatgaaggggatgccccggtaataaatggaagcgatgaagccggccagatcccctactacgccgccgcccagagcggcgatgcatccggtgcggtcaagcccggcccggaccagttcggaacacagctcctgggcctgaagcatatttttggaagcttccccggcattcactacgtgcaggctgggcatgaatcccgcgctctccagggacttcattacgcgctctgcataaagtggggcgacgcagctgtccgtgataaccgcaatcttgccgtccagaccggcgcggtaggcaaactctccggtacggtccagtgctccgttttccacgtggatgtcgtaggaacgttcaccgagagcaagagaaatggtaggcatgaggccagtatgggatattccggagggaacctcaaacggaaagtgcggatgaggcgaagaagacgcattctccttttaatgcgttcttgtcctgggtgccagcggagaaagagtttccaggataactttcaaatgctccgcgcgtgaggccgtgaacccgccgtcatccttccagatgatattgccgttgccgtccagaaggacaatcgctgtttccgccttcttgtgaagggaaagtctgcggcgtacaaaagactggtcataataggaaatcagggaattggtcttcatgtaaaaatccggaaaatcccccagagcctgtgtaaaggcggggacatcaccttcaattgggggtggctgcagaaccagcaaaatgctatattccaccggggttggcgtatgtttgtactgtttgcggaggtcctcgcagaagggaagccactttttcattccgtacaaagtttccgggtgaaaaacagtcagcatgatatggaaactttttggaacgatgggaggcagggaaatattgtctcccagtaaattcatgccgttgatatccggaaaacggtaacgtccgtttcctcctccataaggatgatcgggattgggcgttggcaagtgtatttcctgattcttcatgccctgttagacaaaattcgaagaaataatgttcatgtcgatggttgccgaacagggtatgttcattggtgcggggaagggccttttttctgttggaaggctctctttctctgaaaattccggccgattagaaaatcggtattcatggaaaagggaatatatagacctgttataagtttttctcgaagaaaggtggggtacaagagtagggaagagagggacgttcaaaaaaagacgcgccaggatgggggattatgacaaaagagcatctcattgattaggtgtgtattaagggtggttgcagtgggtatggcctgaataaggatcgggaaaaaatgaaaaaacgtctcgaaaaaaattgacaaaaaggtgtggtatggtagatttctcggcacgccaacacggcgacgggatgaaaagcccggcggctgaagggctcggaagagtactggaagcggctggagccggccacccggaaagagccccggaaaggggtgcgataagaagatttcaagggaatgactaccaaaaaccgccgagggttttccgagtgagccgagaggtgagcgaggggacaaggcccgaaggagcgacctggctctgagaggtgcggtttggtagaagcaaggggaaagaaaaaaggtcgtgacgcgcgccgtgcgaggcagagcgaagaggtcttcaagagacacaacttgaaggaagagctggctgaagcatggcgcaaatgaaatcgcaagattccatttggtccagcaatttcaaaaattaatttgatggagagtttgattctggctcagaacgaacgctggcggcgtggataagacatgcaagtcgaacgagagaattgctagcttgctaataattctctagtggcgcacgggtgagtaacacgtgagtaacctgcccccgagagcgggatagccctgggaaactgggattaataccgcatagtatcgaaagattaaagcagcaatgcgcttggggatgggctcgcggcctattagttagttggtgaggtaacggctcaccaaggcgatgacgggtagccggtctgagaggatgtccggccacactggaactgagacacggtccagacacctacgggtggcagcagtcgagaatcattcacaatgggggaaaccctgatggtgcgacgccgcgtgggggaatgaaggtcttcggattgtaaacccctgtcatgtgggagcaaattaaaaagatagtaccacaagaggaagagacggctaactctgtgccagcagccgcggtaatacagaggtctcaagcgttgttcggaatcactgggcgtaaagcgtgcgtaggctgtttcgtaagtcgtgtgtgaaaggcgcgggctcaacccgcggacggcacatgatactgcgagactagagtaatggagggggaaccggaattctcggtgtagcagtgaaatgcgtagatatcgagaggaacactcgtggcgaaggcgggttcctggacattaactgacgctgaggcacgaaggccaggggagcgaaagggattagatacccctgtagtcctggcagtaaacggtgcacgcttggtgtgcggggaatcgaccccctgcgtgccggagctaacgcgttaagcgtgccgcctggggagtacggtcgcaagattaaaactcaaagaaattgacggggacccgcacaagcggtggagtatgtggcttaattcgatgcaacgcgaagaaccttacctgggcttgacatgtaatgaacaacatgtgaaagcatgcgactcttcggaggcgttacacaggtgctgcatggccgtcgtcagctcgtgtcgtgagatgtttggttaagtccagcaacgagcgcaacccctgttgccagttaccagcacgtgaaggtggggactctggcgagactgcccagatcaactgggaggaaggtggggacgacgtcaggtcagtatggcccttatgcccagggctgcacacgtactacaatgcccagtacagagggggccgaagccgcgaggcggaggaaatcctgaaaactgggcccagttcggactgtaggctgcaacccgcctacacgaagccggaatcgctagtaatggcgcatcagctacggcgccgtgaatacgttcccgggtcttgtacacaccgcccgtcacatcatggaagccggtcgcacccgaagtatctgaagccaaccgcaaggaggcagggtcctaaggtgagactggtaactgggatgaagtcgtaacaaggtagccgtaggggaacctgcggctggatcacctcctttctatggagcaagtgcacggaagtgcacaggtcggatctcttcccgaggggagagaaagcggaacccgcgagggcccgcaacgaaccaaagatgtgtaaacagccggtcgcctggagcgaagcccggcacgacgtgcgtgacgaccttttttcaccgagaaccgcaactgggggtatagctcagttggtagagcgccagctttgcaagctggatgtccggggttcgagtccccgtgcctccaccagtttcgggaaagagacccaaagccgggcctgtagctcagttggttagagcacgcgcttgataagcgcggggtcacaggttcaagtcctgtcaggcccaccagcaaaatcgattattgagggaaagcgaaaattgacatctgcgtggcaaagaaaacgattgctgagaagcaatcgctttccaacaaagtgggtagttgaacaacaactacaaaacacaagataaacatgcataccaagcaatgagacaatacagtaagtcacgaaagggctttgtggtattgtggaagtggtaacagcttttgcaatatgatgaagtaagtaagggcgtacggtgaatgccttggtgccaacaggcgaagaaggacgcggcaagctgcgaaaagcctcgggaagctgcaagcaagcgatgatccggggatatccgaatggggtaacctgatcgaggcaatactcgatcgttcatacctgaatacatagggtatgaaacgcgaaacccgctgaagtgaaacatctcagtaagcggaggaaaagaaagagaaatcgattccgtaagtagtggcgagcgaaagcggatggagcccaaaccgaaggtattccttcggggttgtaggaccacgtcatattcgaccatactggatagtagaacagcctggaaaggctggccggagaaggtgaaagccctgtagacgaaatccagagtgggaattagtggtatcctgagtaatacatcacacgtggaacgatgtatgaacccgcgcggaccaccgcgcaaggctaaatactagttggcgaccgatagtgaacaagtaccgcgagggaaaggtgaaaagaaccgctgtgagcggagtgaaatagaacctgaaaccgtatgtctacaaagtgtcagagcagagcaatctgcgatggcgtgccttttgtttaatgagtctgcgagtcagtgtttgtggcaagactaagggcttccggcccggagtcgcagcgaaagcaagtccgaacagggcgcaataagtcgcaggtactggacccgaagcggaggtgacctacccttggccaggttgaagcatgggtaaaaccatgtggaggaccgaacaggtgaacgttgaaaagttctctgatgagctgagggtaggagtgaaaggctaatcaaaccccgtgatagctggttctcttcgaaatgcatttaggtgcagcgtcacgtgctgatgcgcgggggtagagcactgacaaggctagggggcacacccgcttaccaaaccttatcaaactccgaataccgtgcaatggaacgtggcagtgagacagtgggggataagcttcattgtcgagagggaaacaacccagaccagcagctaaggtgcctaaataacgctcagtggaaaggatgtgggattacacagacagtgaggatgttggcttagaagcagccaccatttaaaaaatgcgtaatagcttactcatcgagtgatcctgcgccgaaaatgattggcgatcaagcgttataccgaagctctggactttgccgcaaggcagagtggtagaagagcgttgcatgcgcgtcgaagggcgatggcgactgaccctggagcacatgcaagtgagtatgcagacatgagtaacgttaagccgggtgaaatccccggccgccgtaaacccgaggtttccagggcaacgtgtttcgtccctgggttagccgggacctaagccgaggccgagaggcgtaggcgatggacatcaggttaataatcctgagctcgcaacccttaaactggggggacgcatgagaaaagatgactaggttattgaattccgagttgagtccacggactcagcgcatcattggatcgagtgccaagaaaagccccagcgtatgctaagcgacccgtaccgcaaaccgacacaggtgggtgggtagaatataccaaggcgtaagagtgaaacctggttaaggaactcggcaaattagccccgtaacttcggaagaaggggtgcctgcagcgatgcaggccgcagagaaatggcccaaccgactgtttatcaaaaacacagcactctgcaaagacgcaagtcgaagtatagggtgtgacacgtgaccaatgccgaaagattaaggcaaggggttagccgcaaggcgaagctctaaacccaagtcccggtgaatgtcggccgtaactataacggtcctaaggtagcgaaattccttgtcgggtaagttccgacctgcacgaatcgtgaaacgagttgggcactgtctcaaccaggcgctcagtgaaattgtagtggcggtgaagatgccgcctacccgcagaaggacggaaagaccctatagaccttaactgtaagctgtcattgtttcttcggttttaatgctcagagtaagtgggagacgctgaagacgccctttagggggcgtccgagtcatcaatgagacaccaccctttgaaactggaggatctaaccctgagccgtgaatccggccagaggaccgtgtcagccggtcagttttactggggcggtatcctcccaaagagtaacggaggagcgcgaaggtgggctcagcccggttggcaaccgggtgtcgagtgcatgggcataagcccgcctaactgtgagaccaacaagtcgagcagatgcgaaagcaggcccaagtgatccggcggtagaaagtggaattgccgtcgctcaacggataaaaggtaccttagggataacaggctgatcacgcccaagagttcatatcgacggcgtggtttggcacctcgatgtcggctcgtcgcatcctggggctggagaaggtcccaagggtccggctgttcgccggttaaagcggcacgcgagctgggttcagaacgtcgcgagacagttcggtcctctatcctctgtgggcgttggaaaattgaggggttcagaccttagtacgagaggaccgggtctgacgcaccactggtgcatcggttgtactgtcaagtgcatggccgagtagctaagtgcggacgggataagcgctgaaagcatctaagcgccaagcccttcccaagatgagttttccctacaggttcgtggaagaccaccacgttgataggtcgcaggtgtaagtgcagcaatgtattgagccgagcgatactaattaccaattgacttcatcatattacatcactccccgtcgtgaatgaacacttgctcttgtctcattctgttaatgcatgatctcaaccaccagccacgcagatgtcagtttacgctgaatatcccccccccagaaatcttcttagcctcatacaacccaattaaaaaatctcacactcgaaagccccaatgctgggctcccgggcaggcaggatgaagatacaataaaacctcttccccctgaagcccggtggccagagcgcagtggtcccacccggtcccgttccgaacccggaagtgaaacgctgccgcgccaatggtagtcggacgataggtcccgcaagagtaggtcgccgccgggatttttttccatcaggccccgccagtccctcgactcgcggggcctgttcttttcttgctcggtcccgttcttctccccctacattctcttagttagtttccttcttgtaagatgtcgtatttcttgtacgtattagtgttactatgttttctcatgcttttgccgccggggcgcttcttggaactgccatgtctccgcttgtttgcgtatctgccgcagaaagatcgcctgtggcggcggctgaagatgtagtggcgcgtgtaactccctcggcaaagggggctgtcttgttccacttaaatccggatcagggcaacaagatcactatttccggtattgccggaggtatccgggtggaggcgtcagatgtgcgccgcttggtggcgggttatggatggtatttaaagaatatagccaaggtccatttttcgtggaacggaaatcggataacgcttccttcccctttgccggttcccgccagtccggttacggtagaaagcccgtggaatatcgtttttgcctataattactgcaccctttcttatacggcggctttttgggattggaacagatggcagcgggagattgattttctggcgttgaatgggtttacgcatgcgctggtaacggcgggtttggaaaagacatgggaagattttttgacaggcttggggtatcctcgggaaaaagctcttcgttttatccctaatccggcatttgccgcctggtggaatatgggaaacctggaaggccacggtggtccgctgagccagcaacagataaataaaatggcccagatgggaaggcgcattgtctcccgtatggaacagttggggatgacacctgtacttcaggggtatgtgggatttgttccttctgactttcaggaaaatgtccggatagacggattgaagcttattcctcagggggaatgggttaatttcaggaggccgtgggtggtggatcccacttgcgaggcttttcccaaactggccgcggactggtacaaggctctccgcaaggtatacggcattcctggaaagatgtttggcggggatttgtttcatgagggggggcggaagggggatattgacgtaacgcaggcggcacaggcagtgcagaaagccatgcaaaaggcttctccgggggctttctgggtgattcaggcctggggtggaaatcctacccgagagttgttgtccgggttggatccggagcgtgcgcttgtattgcagcttaccaaggatatggctgacgggggaaagaatttaaggacttttaatggtattccgtgggtctggtgcgaactggcgaactttggaggcaatacgggaatgtacgggggggttccccttctgtcccggctcggaagtgagttgtccggctataaggataagggactggtgggcatgggaactttgtccgaagggcttgagacgaaccccctgcattacgccctgttcagcgaccgtttgtggactagggaggatatttctgtccgggagtggcttggaaagtacgcacgccagcgttacggtttcgcaccaaaggctgtcgtgaaggcgttggaagttctgtcttcctccatctataaccccgttcgttctcaggaagggtgtacggagtctattatttgcgcccgcccgtcctggaatgttcgaaaggcatccacatggtccagcggggagcgatattatcacctgggcgatattgtaaaggcggcgcgcggttatctgaaggccgcgaatgatcagccgaatttggtgaaaaaggagacgtttcgttatgatttggtggatgttgtgcgtcagtctcttgcggacgctgctttttaccagcttcaacaggtcaggagtgcttttgattccggagatttggctgcgtacaggaaacaggtaaagcgtttcctgtctctgatttcagatatggatgcccttttggcgacggatagccagttcctattaggaacttggcagaaaagggctttggattggggtgattcccggcaggaaaaagccttgatggacaagtctgcgaagatgcttatcactacgtggattgatcaggttccccggtctctgaatgattattccaatcgtcagtgggccgggcttgtttccgatttttatttgcctcggtggaagaatttttttgaatttcagatggatgtcctgaccggaaagaagacgcgtgatgccgcccatgccgcatttatggataagatggttcgggatgaactggcttttgccggaaatgggaaaatatattctgtcaaaccggagggggatactttggccgttgctaatcgtgtgatgaatacccaccgggaaatgttggacgccctgagtgcggaagaaaagcattcctcgggcagtccatgggaactccagcaaggttctccgttgcagtttgatgtgacggatcaggtgactgcttctggcacatatactgctactttccagtggaagaatggccccagcgccttgaaaatccattctgtcagattatacgagggtaacagggaggtggcttccgatgttcatgagggcagaactggcgtggaaaataaggataatatttacagactggaattgaagaagtacagaaccaaccttgattcctatatcctgaaggcagaagtaagcggtgtttctcagggcgcttccaaaggagaaatggtgttgaaaaaactggtggattgagaagtggacaggatgttgtgcagggatgggagaaaaggcggttatacgtgcaggcttttccatttgttccggaatcagtttgtttccctcgccgaaaaaaggaagaagggggggatttcccccctttcttccttgaaagatggcatggtgataaaatttatcggcggtggcgtaacaatagagcgctaaaaccgaacagacccagcgtagcggttgccggttccggaaccacttcattacttgtggagaagtttactgccgacaaatacatgccctcccaagagttcaggatattgtttttataggtgccggttccgcagccgctatgcatgtccagagaaaggctgtttaaatagacggtttcgggaagtgttgcttccttcctattcgtggcggcggacataacggaagaagacgattgggtcgcagagccaaagtagttgttggcggtgttagtgttcgtggtggagaatatggtggctgcttgggcggttcccaacgataaaaaatggagataacagaaataatgggtttcatctttgggctggaaatataacttgatacaattgatatgcactgggaaaaaatctatcgaatttagaatcgtttttttgaaaaacatgaaatatattgatgttataaagaaatattcaatttatttaaaattttagatggaaaacgattagtaatagtcttttttatctcattatcggtattatccgagaaaaaatcatgacccaatggtaaataccggttctagattttccttactccggcacatagccaaaattccgtcctcagaaaactcctgcttcccgaagcggaatggtcagcctacacaagctattctcttttagaagtaaatattgacctcggattcgcaatccgtttgtcgatattcttattgtactgccccgatttatgctccggttccaaaagatgagctgtacaggatcttttgtagagatggattttttttgaatatagccttttcgttcagagggctgcctggtaaatgctgaacatcagaatggccattcccgtgagggctgcgcctgcaatgatgccggaggcggtggggactttatattcccgtgatttggccttgaaaagatggtccgcagcccagccgagcacagctcctgtaaagaaaaggaaggagtcgttccactggatggcccaggccaggccgaagccgatgggggtggggagccattttcctgtccggggaatatagcggggaataagcaccagaatgagtccgagaataccgcctgcaatgatggaaagcaccttgatgctgtgcaaatggctgaaccccatgcccagtgcttccgctgtggccgcccatgttctggctcccggagcattgaaagcctggagagcgttcgcatccggaaccatggagcggaaggccagcacggagacgagggttcccagaaaaattccggaaaactgggcgatgaattgtttgcgggggttagctcccagcaggtagcctactttgaggtctacgagcaggtctgccgaggaactggacgctcctgaagtgatattggccgccatcaggttggctgttacgtgcccgggtgcaatccctccgaagatgagctgtgtaacttttcccatggctccggtgggtgtaatattggcttctccggtgattcggcagacgaccagcgccaggaaaaaggatatgactaccgcgatgcagctcatccagtacggaacgttaaaggatgtatgagccagatagccgagagctcccagagagataagctggcctgtcagaaaccagctcatgggcgtttctattttttccacatctgtcagttttcgttttttactcagggaaaacatggctcccagggaagaaaaggaacgaacaatgcttttccattggaacaggaaagccacaatgctggcgacgaccatgcaggcggttcctccccacagggtccagcttacgctctcccgataacctgctcccgcgggaagcaatttctggctttccagccacggaacgtaaagagcccagcaaacggttcctccgatgaagagactgagggatgttttcatgcctaccagagctcccgcacccacgaacatgagatcccatttgaagaagatagtacgctggtaccagttgccgaggatatgttgctggaccgttccaagccatcgttctcctcctgcagccatggcgatggcattagcggcggcgaaaagggcagaataaagaagagctttggcctggcccgccgcctttttgccttcagaatagagaactttgagggtttccgccgtagcaatactgtctgggaaccttatttgttcaatgttgatcatctggcgtttcatcggaatggccatggtgacacccagtacggcaatgaaaaatatccaggcgaaggtagtgccaagaggcatgtgctgtcctgtcagcaggagcagggcggctacggcggaggtgagggttccccctgtagaatagcctgcagaactggcagcggactgcatgcatgtattttccagaatagtcatgggggatttggaaatgcccaggcgcacaaaggcgttccagagggcaaaagagataattcctgccgtcagagccaccccaaaggaccatcccattttgaggttggcgtacagattagtgagggaaaggatggagcctaggagcatgcctacgatgacggctctccaggtaagctgcttcattctgtctccggaacccagataaacttgatcgtaccattgctgttctacttcatccggagtgccttggaatccatccagaggcagcggtttttccaagcaggaggggagagggatggaagactgggaggacgtagatgccatacagttcataatatagcatttgcgggcgtggtggaaaagtcgtatctgtctttctctgctttcggcgttccttctgcttgagacttgcgtgcttgtgacggccgtggtttaatgggcggcatgagccaatcttttacggataaacttgccgcccgcattaaagagaccggttccgccttgtgtgtcggattggatccgcgccccggcatggatgatttggaggcgattcctgcgctgttgcggaaggttgtggaggaaaccgctccatatgcggcggcgtttaagccgaatattgcctattttgaagccatggggttgcgcggcctggaaatacttgaggatttgcttccagatatgcctaaggatgttccggtggtgctggatgctaagcgtggagatattggagagactcagaagtattacgctcatgcttactttgaacgtctgggtgtggacgctgtgacgttgagtccttttatgggatatgacacgctggagccttttctgaattatgaaggtaaaggtgtttatctgctggcagttacttccaatcccggttctgcggatgtggaacggcaggaattggcagggggccgcagggtttttgaactggtgggagacatggtgctccgctctgtccgggaaggctgtaaaacttccgtaggcatggtggttgggttgaccaatgcagattccagtattctggaacgtattccggatactcctttgctcattcccggcctgggtgctcaaggcggtgatctttcctgcctgagtggttccggtcacgtggcgcctcccctgattaatgtctctcgaggaatcatgtaccagaatccggaattgggttttgcagagaaggccgccggatttgctcagcgcattcgagaggcattgaattattgatgttcatgtatttttttgcaaataacaaaatgataacggcctgcttatggctgtgcatgagcttgtcaaagggagggggctgatatattgaacaggtgcatccccattccctgcccgttttttatggatgaaaagcccggaattgtaaaattcactccccattccacttccagatccgcaatgttgattgcggtggcagtgacagtgggtgttcaggtggctttgtgtgctgtgcttgtagccatacatttgcaggatatgtggtttccctccgtccagggtggggaagtggaaatgacgtttgtgtccccgtccgaagaagtttctcaggagatggaagaagttcagcctacatctgttgttccggttgcagctccttccacagtcagccctgttccggagattgcgtcagatgaagacttattggcgatgaagctgccggaaaatgaagattgttccgaaatgaaggattttcttttggatgaagctccttccgaactcttgccggaggagctcgccgccatgcggatttccatgaatgaagtaaagcgaaggcagcctgtgaagcgcccggcggtatccctgccggggcgtccggaaccggatcagaatatttctcctgataaaaaggtgcgttataaacatgctccgtccttgcccaattccgtcaattcttctaaagtcgggaaggtgaatgccgtggtgaaagtagtggttggagtaaattcccatggggaaccttcatccgtcaatcttcttcagtcaacgggaaatgcggaattggaccgcctttttatgcgttgggtgagagagaattggactttttatccggcggaaaaggacggtgtgcccattgcttccaaggtggtggtgcccgtcaggctgaatatagattaacctgtacaaggaaatataaagatgcttccggagaagacagagaataggcccgtttatgtgatcggccaccagaatccggatacggatgctatttgttcagccatagggaatgcggagtttttaagaactcatggcgaacctggcgcggttgccgccagatgtggggaaatgacgctgagaacatcctgggtattggaaaaggcaggagtgccggagccgatactgattcatgacgtgacgcccaccgccgggacaatctgtcgtcgtgatgtgattagcgtaagtccggacgatacattcctgacggcgtatcgaaggatgacggagaattctctgcaaaccataccggtaattgacgctgattacaaccttcatggcctattgcgttattttgatttgttgagcctgctcatgcctctgaatatgacggagatgaatgtgcgctccgtcttttccagcctgagcaatatcgccaccaccattgacggaaaatgtctgaccggggaatccttaagtgaggaagaaacgcagaatattctgctggtgggtgcttccagtgaacccagcgttcgaacaaggctcgcaaattacaggagaaaagggattatccgggatctgattgttatttgtggggaccgtccgaatgtgcagctatatgcagtggaacatggcgtacgcgctttggtgaccacgtccggtgctttcccttccttggacattattgagacggcccagacgacgggaacatgtattttgagtactccctgggatacggccagtgttggccagttgatccgttgttcccggaaggtgagggagcaggttcagaaggattacaccgtttttccggagaatatgccactgcccgagttgaggcaggctgccgtaaagcgcaagcaggcattgttccctgtgatgagtatcaagacgaacaaaataattggtgtactgagtaagacggatttggtggatccgccccgtacacgtgtggctttagtggatcacaatgaattttctcaggccgtcaagggggtggaggaggcggagattgtggaggtgatggatcaccaccgtttgggtacccagctttctacacgggatccaatccgttttctgaatgaacccgtaggatccacatccaccttggtggcacgcagattttaccatcgtaatgtggaaccctcccaggctgtagcggtctgcctgtgcgcggggattctttcagataccctgaatttgacatctcctacggcggctcgggcagatagggaaatgttggaatggctgacagggattgccaaaatagatgccaagaagtttacagaggagttttttgccaccggttctctgttgcgttccaaaactgaaccttccgttattattcaggcggacaggaagacttttactgagtacggatacaagattagtatttcccagattgaggaaattggtatgtttggcttggaagatgtccaggaaggtttagtgagggaacttcggaagctggtggagaaagaggggctgaagcttgcttgccttttggttacggatatcgttactcacgattccatgttgctggccgtcggggatgaagaagctctggaaaatatcgagtacgagcggcttggccctaatttgttttccgctactgatgtggtaagccgaaagaaacagctttttcctgctatttcccgtgcattaaagacgttgtagatgccggaaatctttgctttttacaggcaagatttttcctgaggaggaacggcgttgccgtgctgtaaggggtatagatcagggaattgcaatgtctgctacgatagaacggcggatagtatccggtatcagcacagtactggctctttcaggtttgagcggcggcgtgcaaaaaactcggtctaggcgtaatagagggaaattgacaggttgcgtagctccgtaaccggcacctttcagtttgaagcaatcctgaaagtcggaactgagtttggagaaaattggggattgaggggcaacgctgaagttcccggccatgataatgggaagttctccatgctgggttcctacttccctcagggtatcaaacaggtattgaagttgtttacggtggatgaagcggagtgtatggaaatatttccagcaggcgggggagtacaggtcgaagcgatgttcaaaaggttccagactgatgttgatgagccgaatcgccaaagaggaattttccggtatccagtctacaatcaaaccggctgtgtccgtgatgctctgggctggaccaatctgaccgtgccttacaatgatcgcgcaacttcctatttgcttgatataagaggttctaccgaaaatactgtaggcaaatttaagtgttcggttatagttgctgcagccttggacgaaaatgacatctgcacggagtttggatatttgttcaatgggaggaggttcctcgcagccctcgtacaaggtaagaacccttatttgcctggcatccggagatggcggcattttgtagtattccattccagttctggcaatgggcgggagaaagtctgtaatgacgatgccgtacgcaacccagacgataatgccaagcagaccgatccgggaaccgaagaccagccatgcaatgagcgccggaaaggagaaaatgagacagcaagcccatatgggcagtgacgttgcaaaagccatcgtgtctgaaccggtccagaaaatagtgacgacgatgacccacaggcacagagagacgccacccagcgctattcccaagtggttgactccggatagcgttggcagaggttctgccagatgtttgcgtcttctgagccgatgcactgtggtgacagattagaagcccatgccgggagggagacccaagcctcctgtcagctttttcatttccgccgcggctgtttccttacccttggcaatagctgcattgatggtttgaaggagaagctcctggagaaattctgaatcagacgggtcaatgatggaaggatcaatgaccagttccgtgaggttgccgtcacaggtggcggtaactttcaattttcctccagctccttccgttgtaacggtttgggaggcgagtttttcttggacggccgcaagccctgtctgcatctgctggacctgcttcatcattttcattatgttcatggtcgttgtgtctggatggatgagttgactattgggaaatgatacgagcccggaaaatctccatagcggcatcaatcagcggatccgtgtagtaagagttatcttcattttcctctttggaagcttcctggacaggctctgcggtttttttctgcggggtatgaggtttaggtgcaggaatggtggatgcggaaggaggtggtgcaggcagaggagccagttcttcctgcacgggttcgggaatggagaaatcctgacggatagaaatagtaacagaggttccaatatattgggaaagagcggcttccaaagctgttcgcagagggccgactccaagactgtccatcccctgacggtcagaaggatgaaaagaaatggcgactgctacgccatcataaccggaaaaaacgctgttggctagaaagtccgcttgaagagggaatttggcggacatttgttccaacaccgttttccagtcttcttccgtgatagttcttcctgattgttgggacagaactgccggttcctctttttctacgggtgcctgggttcgggatgatgagcttggagtatcgaatagattgtcaaagaaactgttagttcgtctttccagaggaagattttcctctggatccataaaagtaggctctggagaatccgtaggaaatttcgacacatcggaggcatcggagtctggatgccgggtgatttcttcggaggcaggtacggtttttgtccgcaatttagtggcggagtagggaaattcttcctctgcaatggcaagagaggggggggctgcagcgggtgtaagagtttcctgttgtggttcggcttcctgcgtaggatggggagaagcttgagcgtcagtgctctgaattttctgtactgcgggagatgaggcaggggaggacacagaaaaatctggaatcggatccatcaaatgttgttctgtagctggggttggttttgttgcagcaacaggagactggatgtttggccggggggccggagtgggagccgtggcggaggaaataaatgtacttggttcctgctgtgaagcaggatctgaagaagaggccggtgccgcagtggctagcggagcaccttccaacgccatgataatatcgctgatgctggcctcagccagagtatgaacggctttaatcaggcccatttccagatgaagccttttattggaggaccagcgcattttatcttccgtttccgccagaacttccaccaaacgcaggattttgtccgtatgggtgcgtttgaccaattcggcgagttcctccttggaggattccgggagagaatcaaagctggcttctggatctactttagagaccagaatttcacgcacggcggagataatttcggaaagaaactggctcatgtctcttcctgcttccgcctgttcatgcagaagatgcaggagagagggaagttccttgttcaaaataagcgccagagcatgggccacggtctcccgggaagtaatgccgaaaatgtggagtacctgctgttcttcaatatgatctccacagaaggaaacaagctggtccagcatggattgtgcatccctcatacctccatccgccactttggcgacagcaaaggctgcttccctgctcagacttactccctctgcagaagcaatatggagcaggtgttctgcaatgatttcagaagggatggggcgcaggtcgaagcgctggcatcgcgatagaatggttggcagtattttgtggggttccgtggttgcgaaaataaatttgacatgaggtggcggttcttccagcgttttgagcagggcgttgaaggattccttagtgagcatgtgcacttcatctatatagacgatacggaaatttcctctgctcggagcgaaccgtacgttgtccctgagatcccggatgtgatcaatgccgcggttggatgctccgtctatttcaagaacatccaggctccggccttccgcaatttcttcacatatatcttcatgcgggtcaaaatccactttggggccaccgctgcagtttagagctttcgcaaatattcttgcggttgatgtctttcccgttccacggggacctacaaagagataggcatgggcgagacggttgtgctcaatggcgtttttcaacgtccggacaacatgatcctgtccaaggacgtcatcgaatgtcagaggacggtattttctggcaaagacctggtaactcacggttcagaaagactagaagatgagttcccgtttgaaaagaaaatagagagtaattgttttaaaatgttgataaaacggttcttgcacactcccgctacggagcttgcctgaaaaaaatatcaagaaaacaatgaggatgtcattttgatattgaaatctgaaaatgttcatgccaatctcacaaaagtaacaggaaccttctcatctctataatttcctatgtgggtcaaagtatcaatagcagccttggtcattgctcttctcggaggagccatgtattatcttgataacgaggaagctctaaccaaggagcgtagggaatgtgcttcccgctacaagaacctgaacggccttcgtggcgaatttacggaagaaaagacgaaatatgtcgatttcctggtgaagaatgaggctctgacgaatgacatcaatgctttaaccaaggaaaaggatgaactggaagtaaagaatcaggaattggcctcagccaatgaggccaagaaatctgaccttcaaacgcagcaaaccgctttggcggaattgcaatccaagagcaaggatatggaaagtatccaagccattgctgacagaatcaaggggctggaagaagagtccaagcagttggaagtggttaagcaggcggaacagggaaaacatgatgccatcgttgctgaaaccgaacagcttgttgtgaataatgccgctcttcgtcagctcaaggccgaccaggatgcccgcctttctccgcccaacctgaaaacgagggtttcccaggtgattcatgattttaatgtagttgtgattgacggaggagccgccgatctgggcgtggtgcccggttccaagttggccgtcatgagggacggcaacaaaattgccgagcttgacgtaaacgctgttgaatcccgtgtttccacggccactattctaccaagtacggtaaccgccggcgaacgtgttgaagccggagacgtcgttgtatctgttcgtccctagcatttttccggttcaatacactccatacactctcacatacatacacaatgaaaactgtcttagtagttttattgattcttgcagcaggggcgggcgcctggttctccggtcttagcggccttttcggtattaatggccagtaccaggattttaaagaaatgatttcgtatcgtaagaccttggacaaggaaatacgtacttggacaagcttgcgcaacgacatgattaagaatcgtggcttggcagcggaagaaaatcttagtctgatttccaacaaggcttccgtgacgcagcagcgtgatgaacagctttccaaggaagcggagttgaaggaagaagaagtgcagttgaatgcggacttgtccaaaatcaataaacagattgaggaattaaagagcaagttgcaagatttcggtgtttccagcgtacaggaaatccaggagaagatggaatctttggaagcttccaataagaagctccaggaagatattgaccagattaaaagtgctacggaagtggcttccaagagacgggcagaacaagcttctgagctggctagccgccagaaggagcaagctgaataccgagctgctcttgccaaaaatggggaagagtatcccgttctatccgtggatccgcagtggggttttgttgtgattggggccggacagggcagtagtattgatccaaatacggttcttcttgttacccgtgaaggtcgcagcattggtaaattaaaggtaacttccctggagaaaaatcagacggtagctgacattattaaagacagcgtaccgtctggtatgagtattcaacccggcgatagagtacaactcctgcgtccccgtcagtccgccaaataaaggtttgccacgtattttccttgaaccccgttgtgtcgtccggcataatggggttcaactttttaaaaggaaatgatgaaacgatttgcaatctcctttttgtttgtgtctttttctattcttctggtctcttcctgttcctggttgatggaaccgcaggagagggagcgtgtgccgcagccgcctcccggtccggaaaagagtgcgcttcctcataataagacccaaagatttgaggcggaagcaacgctcggcccgttggcctcgccgagacgttaacggcatccgaatgacgctggacggtgattctgttctttacagtatccgacaaaccggatacaaccgcctccggtttccaagtggagagatggctgagctggtctaaggcactcgactcgaaatcgaacgtgggctttaaaacccaccgtgggttcgaatcccactctctccgccagtttttttaagccccgtgggatgtcggggcttttattttttgacaggaagagagctgaccggaaattcggacgaacgactgtttagtggtaaagagtatgttcttgaccgggatctttaaggcgccctccaccaggatgattgtaactataataatttttatgggccgtctcggtaggtttaccaatgattacatgatccagaaaacggacgcctaataatttggagcattctcgcacgcgttcggtcaggaggtcgtccgtacggctgggggaagggttcccgctgggatggttgtgggcaaggatgaagccataggcattgtgaatgatggtggggcgtaaaatgtcgcgaggatgagcaattgattcatttagggtaccgctggagatttccacaggtttaatgagacggcacttggtatccagtagcagaacgagcactgtttccttctctttccagcgcatggccgttgtcagatagtcatagacatcttccggtgtttgaatgggctgacgcgacagagtttcacggagagcccttgcacccagttcaaaggccgcgcttagcgtagcggcttttgccatgcctattcccttacaaatattcgctatttcagcagcctccatatgggctagggcatctagagagccggcagactgaatcagatccgaggacaagtccaatacgtttttccctttgatgcccattcggagaaagatggcaagcagttccgcattgctgaggctgtgccttccctggtggagcagtttttccctaggcaaagactgggaaggcagttcctgaagtttgcggtaggtcatttcaataacagaggcgcgcggtggaaagaatggcggcaggaagatggcgcagcgtatcccctgccgttagtgtttgctgggttgcttccccagcggagattgccatttcagaagctcggccgcacaggtagacgcccagaacggcagaaaccaggagagattccccctggcttatgaaacctccacaaacacctgccagcacgtccccctggccagcagttgccatgccgggatctccggtgatgttataaaagaggggtttcccccgttgggtgacgatggtgcgtgctcctttgtaaatcagggctgcttcatgttccgccaggaagcagtcagcaatgtctgcacggatggcatagttatcagcgtctggcagaagtctgcgaatttctccgtggtggggagtggccagaacgtgttctcccaagctccactgcatggccgcggccagattcaacccgtccgcatccagaacggtgggagtacccgtttccagaataaggcggatggcttccgcatcttcttccgatacggaaccgataccgggaccaatgaggaaagcactgaatgtgcgaatggagatatctgcgtaactgtccacgggcctgaccatgatttccggaggcatggatggagcgattaagggatagatatctttgtgaacgtgaagtgtaaccagcccggctcctgcacggagagctgcttcacagcagagccgggccgcacccagcattccttccgaacctgctatgacgccaatgtgtccgcgtttgttcttataatccgtatagggtcttgcagagaggaatttggtaagccgtgaggaggtaataagttccgtggcggggagcgcctgtacgtgaagaccgggaaggtcgatgcagactaagcgtccggcaaacagggtggcatcatcgtccagcagcccctgcttaacggctcctatgcacatggtgaaatctgcttccacagcattttgctgaggcattcccgtatctggatccactccggtggggatatcaatagccacggtacgtacagccccgcaacggtttcttatatagtttatttccgagcagagagcggagagttccctgcggagcatcccctttgctcctattcccagcaggccgtccagcaagatcataggttttcccgtacggggcaggggaggggcctggtattcctgaggtggaggagatatttccgccaactgccgcacggaaagttcactccattcgttgcgcgggtaagcggttcggatgcctatttcccagccatgttgtttcagtatgttaaggacggtgagggcgtctcccccgttatttcctttgcccacataggctacgcacaggcccgggacggggaagaactgcatgagggattcagcaataccggcggaggccagtttcatcagggttctggctggtgttccgctaacgatgagttcgcgttccgcgatctgcatattttccgtagagcaaactttcatggcacgctgatggagacagcttttactttaagctaaaaaaccttctcctgcaagccggagaaggtttttataaaaggagcggatcagggaacggctacccgatgcggaacgtgatgcgcgctttggtcatgtcataaggtgacatttccatacgcaccttgtcccctaccacgattttaataaagcgtttgcgcattttgccggaaatatgagccagcacttcgtgcccgttgggaaggcgcactttgaacatggttcctgccagtacggcgcagatggtgccttccacttcaatttcactttcggagttttcttccttgggttccgatttgttgaaattcttcctgcctttggtgtggcgtcctccgcctccttgaggacgttgcctgttggtgttacctccggggcggcttccaccccctgttctggaatttcccggtcctgcgggttgtccggccgaccgtgccactcctgtgccattgccggaaggccgggattgtccgggacggttgctggtgccggttggtctggaaccgggacgggaattctgaccgccgctgggacggctgctggatcttggattcgggctgataggactctccttgtaaggttaaaagaacgcgcgtgtacaaatttcgcgcaagcgaatgatagaccatatttttgcaagggcaagtcctgaatgtggaagttgcgcaattaaaacgcaattctatggagggagacgggaaaaagtctgtaaaagagaaaaagtatttgacatttacgtgaataatcattaggaatgcgcccccgaattggaagataacggcaggatgccgaaaaacgagaacgaagaattgaaccatgaagaccttctcagccaaaccgcaagaagtagagcgcaaatggtatgttatagacgctgccgacaaggtgctcggccgtgttgccgttgaagcggctaacattttgcgtggcaagaacaaaacaattttcaccccccacgttgactgtggcgattttgtcattattgtgaacgcggacaaggtggtgttgaccggtaataaggaaaatgccaaaatttatacccgtttctccggttacgtcggcggtaagcaggtggacaccccccgtaaaattcgcgctcgccgccctgaacttcttctggaactggctgttaaaggcatggttcctcacacccgcttgggccgtcagcagatgaccaagctgaaggtttatgctggcgccagccatccgcatgaagctcagcagcccaccgccattactctctaattgattttttcagacatgagtcagacaaccccatacaacgccaccggccgtcgtaagaccgccattgcacacgcttggcttactgaaggttccggccgcattacgatcaaccgccgcggttttgaggaatatcttcctaccgttcagttgcagaatgctgttcttcaaccctttcaggttaccaataccatgaacaagtttgatgtgaacgtcgttaccaagggcggcggtattcacggacaggttggagccattcgcatggcgatcgcccgtgctctcgttcaggttgatgaagctttccgctcccagcttcgtgaattcggtcttctgacccgtgattcccgtatgaaggaacgtaaaaagcccggccgtcctggggcccgcaagcgttatcagttctccaagcgttaagcttggctggttgcgaaggaactggctttaccatttctttctcggaaaaggagcgctccctgtggagtgctccttttttgttgcagaaagagctttgttttttactgctttccgcgtctttaaaaagcctgttctggttggattgcttacggcggttttcaatgattttcctgcatttgctgtgagggcgggagacaagttttcctgtgctggagtgggcagttggcgagggttagcgatggtacggtgttcctgccagaatagtatggcagcgataaagctgttccagcaggacaacgagcgccagttcatgttgaagggtgaatttgcttagggacaggatatggttgcaccgggatcgcaatgcttccgtatgaccgtccgaggctccgatgagaaacgcgatgcggcgcacggaacgcatttgccaatcctttgctagatcgaccagctttcttgtggtccagagttctccgcgttcatccatggcgatgcgcaggcacccctcactggcggccagcagacgttttgaaacgtcctgggagtttccgtccctgacaagcttgagttccactttgccgaagggcctgaggcggttgagatagagttccacgccttccttggcgtagcctagggaaggttttccggcggccagaatcaggaattgcatgaggagtcagggattggaagatgagttaaggtagttcagcagattgcgggcccacgtttccgaaatgccgcggatggcggcgatagaaaccgggtctgcctttttaatagcagctacggatttaaatttttccagcaacagtcttttttttgaggcgctcatgcccggggcgtcgtccaaggcgctttcccgcatgcgtttgcggtagagcagttcgttatagccgttggcaaaacggtgggcttcgtcgcggatgcgctgcatgagtttgagggctcccgtgctgtgaggcaggcaaaggggctgggattggtgggggaaaaatatttcttccctctgtttggccaggccgacgatgggcatgtctcccaggccgatggcttccaaatcagccagagcggaggaaagctgtcctttgcctccgtccactactaccagatctggaactttgatgggggcttttccttccgcgctgagtttcttaagccactggtacagggtcatgtccgcctgccgtgaggctacggcatcgctctccgccagaatgcgggagtaacgcctccggatgacttccgacatggaggcgaagtcattttgtccgtctacagtgcgtatacggtaccgccggtaggccttgttgtccggcctgccgttggtgaagcgcaccatggaggccacgatatggttggaagagacattggaaatgtcaaagcattccataatgagtgggggagattctaatcccagtgctacccccagttccttcatgtcttcttccgggtgaacggtgccgggaagatcgggagttccttttcggaacctccgggcgggttccagtaccttgaccagattgtcccggatgtcccgcagatatgccgcgcgttcaaagtccagttcatcggcggcttccatcatttccctggtaagttcgtccagagcgcttttttttcccgtcccttccagcagacgcaccgcctggtcaaagttccggttgtaatcattgatggaaatgcggccaacgcacggagcggagcagttgcgaatcacatccgcatggcagtgcctgaagtcatggatacccggattttttgtcttgcaggttcgcagccggaaatgccggttgagccattcctgcgtggcgtaaagagcctgggagtggacaaaggggccgaagtagcgcgctccgtcatctttgcgcacccgcgccagctggaaacgaggcagtttttcccccttcggaattttcagcagggggtagcgcttgtcgtccttcatctggatattgtaatgcgggcgatattgtttaatcagtttgctttccagcagaaaagcctcctggtcatttctggtttcaaaataatcaaatgacgcaatagcattaatgagcgctcttgtcttatggttggagagtgtggctcccgtaggagaaaaataattgcccaggcggcggtgaaggtccttggctttgcccacgtagatggtatttccccgggcgtctttcatgatataaacgcctggtttgtgcggagtttccctccagagttctttcagggttggttgctcgcggtctgccacgcaggcattatgccatatgaggcaagaaatggaactgcggaaacgtactgtattacggctacttggcttgcctaggaaaacttcttctgtataatcccctatgtcttttgtatgaaccctgtaccgtttaccacgttggccgccgccatggattttgtggtgggagatagaaattatcccctttctgagctgttcatgaaaggcggtttcatcatgtggccgctgcttctgttatccatcgccggagtagtggtgctggtcatgtgctgcttttctacccgtgctgccgccgttttgcctaccaaactggtggaacaggcggaatctttcatccgcaagcgggattacacggggctttccatcctctgcaagaatggagattcctgctacgctcgcgtgatgttgactgtagccaacttcatgttgcgcaacccctccgcccagtttgaggaggtgagggagatagcctctgcggaaggaggacggcaggcggggttcctaagccgccagatttcctggctgtcggatattggcgccgtagcccccatgctggggctgttggggaccgtggtcgggatgatgaaaaccttttttgagattgccaacggtgatttttccgggggcaagcaacgtattgacatggcgggcggcgtggcggaagccttgattacgacggcgggcggcttgatgcttgggattcccgccatcctggcttatgtatatttccgcagccgtgtacacaaacgggtaggagacctggaggcagccgtcacgcacagtgtttccgtagttgccacccagcttcagaagccacgagccggtgcagctggggcttttcatgaagaggaacttcccagagtccccgtagatcccacttccctgcgcgatgtgcgtgggctctagccggaacgcatctacttctccacctcaccggaagattgtatgaaatttcattataaaatgcccagtcctatcgggttccaattagcccccatgctggacatcgtatttctgctgctggtgtttttcatcgtaacccagacatttgaggatgatgaaccggatctttccatcaatcttccttcagcagagactcccaagcccggtgaaaatgtgtccaatgaaattatcgtgaatatccgtaaagatggtaccgtggtaatcaaccgccagccgtacacaatgccgcagctggaagacaagcttttttctgtcgcccggttggacaaaactatgctcgtccgtatccgcgtggatgagaaggcggaatccggcgtggtggtgcatgtgatggacgcatgtctgaaggccgggctgaataacgtttctttttccacgcgtcctccggctccatcttccatcaatgtttccaattcccaggcttcatgaaagcgttcttttccattaatgcaggtttaataactttggcgatgttttctgccgcccaggaaaatattccggatgccgctcctatcgcggatggtccgctggtcgctaatccggagctggatacgctggatatggcggacatgctgtacaagcaggcccaggctccggctacgaaggagaaccggcaggaatatggacgccttcttgatttaagcttgcgtaaatatctggaatttacccaacgtttcccccagtctacccaggctcctctggcagagtatcgtgctgccatgtgtttggaggagctgggcaggaaagatgaggcacacggcctgttcctcagattgattcagacgggcagccccgctctggttgccgcctctgcctaccgtctggcgacggatgcttcttctgccggggagatagataaggccatccagtattaccagctcgtgattcgcaatgcggaacagaatgatttgaaggtggacgcccagtaccgtctgggacgcctgtttctttccaacggtaatccggagtcagccgccaccatgttttgcgcggtgatgggcaatccggaagcggatgccaagtttgttctggtgtcccggatgggatatgccgccctgtgtgcggatacgggacgcttgggagaagcctattccgaatatcgcaaggtgctggaaacgcccggtgtggataacaggaaccggggaatcgccactcttcaggccgccatgctggccaccaaactgaaaaagactgcggaagcccagggcctttatgaacggcttttgaaggacgagtccctgaaggagatggcgccggaggcccgaatggggcttcttctggggctgtacaatatgggcaagtacagggagatactttcccagtatgagcagcagaagggaataaagatgccgacaaaggacggccaggtgcgtctgctgatgctgctggggcagtccgcctataaattgaaggagtatcggaaagcggcggatttctttctggaagcggaaaagtccgtcccttatacgcaggaggccatgcaagcctccttttaccggttattgtgttataatgaactcaagcagaaagatcttccccagcgggctcagagcttcctgaaccattatgccaaggcttttcctaccagtgaactgcatgatatggtgcgcctgatggctgcagagaacctgttcagctccaatccggcggatgccgcccggttttatgccagcattgattttgacaaggtgcctccgaagatgcgcgcggatattttatataagagcgcgtgggcgattgcccaggccgggaacagaggtgtggccgccaagctgctgactgattttatcaatgattttccaaaagatccccgcatttgcgaggcattgacgttacgcggagacatgtatgccaagaccaagaaggaagctgaggctctgatggattttgaccgtgtgattgcccgttggccgaaagctgaatcagctgccgccgcatggcagagagccgctcagatttatgcgggacgccaggatatggcgaacatggcgaagtattatgaaggcctgatccagaattttccgaaggcgtctcctgccgctctggctgaagcccatttcctgctggggcgtgcggcgtttgaccagggagatttcaagtcttctatcagccatatggcggaggccaagacgctggatccccagaaatacggagaacaggttaatgtgctttccgtcctgtcctatcacaagctccaggacatgaataaactgaaggaagccctggaaaccctgcaaaaggaaaatccttccgccgtggctcgtgtgccggatgtcattcccgcatggctgggtcttcaggcctatgggatgaaggatctggaaacggcggacaagtatatgacctgggctacgcagaacgaccagcttcagaatgtgaagaaggtgatttggcgtaatttggcgaaggtgcgcctggcgctcagaaagtatgaccgcgccttggtggcttccaacaatttcctgaaggatgaggatcagccttaccgccgtgcggacggcatgctggacaaggcttccattttgctggggctgggcaagtatgcggatgccagaaagacggcggaagatgcgctggctctgggcgtggaaggtcctttgatggcttccttgaaaattgttctgggggatatttcctatgcggagaaaaagtttgatgaagcggccaagcattacggtgttacggccgagctgtttgtcaatgacgctgaactgaaacccaaggctctgttcaaggcggcagaagctttggacaaggccggccgcaaatcggaggcttcccaatatcggggccgcctgcaaaaggaattcccggattggaaacaggatggagagtctttgcctccggacgcacgataagcgttttaaagattgaaaccggaaatggagaacaggcgtaaaagatggtatgatctgtttggattgctgcctcgcaatctgggccgtctgttgctgtggttcagcctcattcctatcgctttcatcatcgttcttctcgtttatgcatggagggcggaccagtatgagctggacgaggttttggcgccgttggaaaattgtgccgcatatgatcgcaacggccagtggataggcaccttgacagatcatgaccgggtgtatgtagcgcgcaatgaactgcccgataatctggtgaatgctttcattgcgcgggaagatgaagactttttcgaacatggcggcattgtgtactcttccattatccgctccatttgccggaatctgactacgttgtcctatgcccagggtgcttccacgattacgatgcagctggcgcggaattgttatgagctgggggggaagaccctggatcgcaaggttttggaaatggccgtggcccgccgcattgagggcaagtattccaaggatgaaattctgacggcttacctgaaccgcatttattttggccagcaatgctatgggattgcgcaggcggcggatttgtatttcggcaaaaaagtggcggatctgacactggcggagtgcgctaccctggccggtctggtgcgcggaccttccatctacaatcctgtttacagcccggaggctgctgccaaggtccgcaatgcgacgctggaaaggatgtttgagtgtgaattcattacccaggaacaattatggcaggcgctccgcgaaccgatggcggtggccggtaaacgggaagctcggcccggttcttatcccgttctggtcgtttcccgcgagttgggagacctggattgctgcgacgagcaggagggaacctccagcatttttgtaatgaccacgctggatttggaattccagcggatggttgaagatgtaagcgagcctatgctggccgctctggaatcttcttctgtgtgggcagggttgcccaaaagggtggacaaccagttgaatcgttgtgtgcaagcggccatattgtgtgtggattcccgtaaaggggagttgctggccgtaacagggggacgctccgcccaggacggtctggaccgatggcagtccagggtaatgcccggcgatctgttcactcccatcgtcaatttatgcgccgtcgaccagcgtagaaccgttattcgcagcaatccggaagtcactggccgcggggtaggtttcaatacagtaatagaaacggcacaaaaggccggttacaaaggggaacttccccgttcttcggacttgtataccggcaggttttccgtgcctctttcgcatgccgtcaatgccctgtatctcatcggcaatgacgggctcaatgtgagtatttcctccgtcaggcaggtgggcaccaccaaaaagaacctggtgatggtgaatgccccctctccggaagaaagccgccgggaaatcctgcctagggaatccgcccacctggtggcgtcccttcctcccttccgctacgacgaacgaaccaggaaaaccttcgtcaatgtcaaacttccgggaaatacgggacatttttccgccgtcatggggcgttatttcacggtttttgcctgggtgggctttgattctccggaggccgccgtctatgaaaagaaaggggtttccgcggcgttggcaaaaacctgttcctccctggccggggaggtgtatgaccgtgcggaggaaggccgcagaaaagctgtccgggaacgccgggagcgggaaaatgctgcagagcagggcccccaatgaagttcaattttccattagtagaagcatcatgagacactcacttgaaatgaccacggccatccaggccgccaaatccgccggagcttttctgaagaagcatttttatgagcaaaagaaggtggatgaagccagccagaatgatatcaagctggagttggacaagctttcccagaaactgattacggaggaaattctttccgtgtttcccaaccacgctgttttgggagaagaaggatacaccggggacaggaacagcgagtgtgaatggattgtagaccccattgacgggacggtgaattatttttacacgattccctggttctgcgtctccatagctttgcgccgccgcggggaagtggtgttgggcgtgatttacgatcccatgatggatgaatgctggcatgtggaaaagggcgggattccgtacatgaatgatcatcccatgcattgcagccggcgggaacgcatggcggaagccgtggtattcgtggggcacggcaagacggacggttccaaagaaaaggggattgagcgcttcgctaggatcgcttggcaggtacgcaaggtgcgcaataacggttctgcggctctggccctggcttatattgcctgcggcagatttgacgcctatgtggaaagcgtcatttccatctgggatgtcgccgctggggttttgctggtggaagcagccggcggcaaggttgttttggaaccgaaggaagataatccggaacagttcgccattgccgcatggaacggccgcatccctatcatggaggcgctgggagaataacccgaacattattgccgcagtaccgtatgaaaaacatgatcgctttgaccgggatcgggtatgatattcaccgttttgcggagattcctcgccccttgatgctgggcggcgtgcatattccttcctcccgcggcctggacggccattccgacgcggatgttttatgccacgctattgcggatgcactgctgggtgctgccgggttgccggacatcggctactggtttccgccgggcgatcctgcctgcaaggacatcccttccctggatattgtggcgaaagccgtttctctgattcgggagcgtggaggtcgcatcgtgaatgtggactcgtcccttattgcagaatctccccgcatttctccttatttggagcagatgaagggagctttgggaaccgctctgggaatctctccggtccgcgtgggcatcaaggccactaccaatgaacagcttggcgcgctgggccgtagggaaggcattgccgcttttgccgtagcggctattctgatgccggaggatttggccatgccgtaaggcgaatgctccggttccgtttctggaagccttttttcaaaaaaggaagccggtacggggctttaaacaaggaatatgcttcaggaataacgggcaggtggaaatggcgcttttttggggagccttttccaagcagttttaatgaaatgacaggaaatttttaactgttccctggcagaaaagccgtttttggctgcataataatattacccatttccctgcacagggaagaggcgttgcctgatatcagctgatgcagcggtaataataatccacgcgggagatgaaccaagaccatttgaagccgggtttgccattgtccagcagaaggtgggggcaacgcttgccggtccagtagtaatggggcacgacattccgcaggggaatatcgtgggcatacatgttgtaggccgccagcttggcggcgcggtcaaaggttttgacgatgctctgtcctcgcttctcacacatttcaatgccgatggagtacatgtctccggggccgccccggtccgcatggcgtcccgtttcattcagggggatatgctgcatggtcacgtacgggtctaccgtataatgccagttgcagcgcaaagctccgttattcagggcgcgcgcatgctgcatggcgtctgcggacgggttttccgtgttgtgcatggtgatgaagcgtggcttcattcgggaagaacggcggcggagcggagaagatttaggcatgaacatcggccggacgttacattccgccagcaattggcgcggagaacgtttcaccacggggaccccggagggcttaaaggagatcatgggagccattcctgcttttccggaaggttccgaacaactggtcagggcaagcagggcggcggtttccagcagaaaagttctgcggtccatgccctggactttctccagcatgggctggagctgaccggaaaagcgggcaagataagtggcgatggtggaaatattgctcatacggaggccggggaatggggaattttcagcacggatgcgggaaaagttaagttcacgctaagattcgctcttcttctttgcaacgaaaaagtgtgaaagcttcagcattgtgccgaattcttcgctctttttgtcatattggtttgcttaaaccgttgttgagagcagaacagtatctgcttctgcggcggtgacggcatccgcgcctgccggggacagaatgaattctcccttccgggccgttttcccgtcccagagcacggaaccgcagaggaccgtgaagacggcaaagcgggaggagtccggctgggtaaaccgttctcccttatccaggcggtattcctttgtggtgaaatgcggcatttccgtcaggtatccggggcgctggctgagtttccggaattccccgatggaatccaatgcctgttccaggtgcagttcccgtcctcgtccggagtcatccgtgcggttccagtcataaaggcggtaggtggtatcgctattctgctggatttccgcaatgaggtgcccggctccaatggcatgaaccagccccgccggaatgtaaaggtgttcccccggttccagatgggtggagcgtatcagttgctccatctgtcctgtttccgccgcatgacggatgtccgggagtgtggcgttttccttcattcccccgtaaatcagggcgtctggggatgcatgcagaacataccagatttcattttttacttctccctgccgggctgccgccgtgcgttccgggggatgcacctgaacggaaagattttcgcgggcatccagaattttgcagagcaggggaaagcgggggaaacgctcgtagccgggaccgaaaatttcctgccgatgttcttcccacagccgatgcaggggcattccttcccattcgccgtccttgactatactcatggcttcaggacggtcgctgatttcccacgcttctccataagctgtttcccggtcgggcagttcccgtcccagcatggttctcatgctctggccgccccagatgcgcggctggtagatggaatggaatcgaaaaggctgcatggttgtagcggaagcgtaggatatcttttatggacgggcaagcaaaatgcccacagggtttcctgtgggcatggagagaggaagacggagaattgcctgttatttgatggattcccagacaatgccgatttcgtcaaatggcacatgttccttgttcttgtccggtttcggaacgccgtagttggtccggaacaggggcaggatgggagctcccgttttaggatccttgctcatgggggccattccaacttcttcaagcagaagagtcatgccgaattcaccaccaggaccttcactaaccaagatttcaatggggtaaaccttgccctgttccaccgtgaactgcttgccggctgccacaccgcgcatagtgttgttccagtgcccggaagaactgtatttgtagaacgtaacgggggggacattgatgcccacttcccggagttcctttttcaagtcgtcattgccgggtttgccttccatggcatcaagccatttggcattgtttgccgtcatttttcccagagaagcggattcccagccgtagtcgaagacattctgtttattgaaccgtactactaagtagtcgtctcccagtcccacgaatcggaacgtgccggacttgggggcgcgtacttttccccggtaaatggcgagccactggctaggctttactttgtcatcgcaaccgtaggccttgggagcgtctttggcgggagttctgggtatgtagaactgggctgcgtataattgttgcggagccttgtaaaaacggttcagttccgattcgttccagcctttgttcacgaagcgggaaaggaactccctgtactggttcatgttcatgttggtaggacgtccgccaggagtctgcttggtgtcgtaaaaggtccctaccagcgtgcttccggagggttgggacgtaccgaaagcagaggtggagtctcccaggtcggggccgaagccgtcccccatgccgagggcggttccctcctccagcatgacaggttcatcgggcgggtcaatgtcgatcttggggaggctcaccggagcggcggccgctgccaccacgaccttgacgggcgtctccgcatgggaggaagaggaagtttccctctgtacttccggcggcggaggcgtatccgacggcggcgcatcgtccggcgtgatgtagccgacgactttgggttcttccggaggggcgatgatgatggtcagggagtagagaatggctcctgccaaaacgacggagagaatggatgtcgctaatgcggcaatataatttttccgcctttccttgcgcagggtttccactgcgtcttccgtgggttctatatgaaggctcatgcatgtatgatagcacaagaatcccatatgttgagtaacatgaagataacagggataacatgtcggtaacaaaaaaggcggccttgccgtcctttctccgtatgggcttttcagcgtttcccccgtctttccgtccctcccggtgccagcgcaatggcaagggtggagcagatgcccagaatcaggggataatacaggtatttcatgatcagcaggggagaaacctgggagattccggcggccatgagcatttgagcaccgtaggggatgactccctgaaccaggcaggaaaaggtgtccagaatgctggcgctgcgtttgggtgggatatggaatttgtcacttatttccttggcgatggggccagccgtgatgatggcgatcgtattattggccgtgcagaggttggccagggaaaccagcccggcaatgctgaattccgcgccgcgcctgctgcggatatgggccgtaatttttccgataatatacgcgatgcctccgttgaaacggatgatggacagtacgccgccggccagcagagtgacgatgatcagttctcccatgccggtcatgccgctgcccatggcttggaaccaggccatgaaggagaaataccccatgccgacgccaatcagtcccgttgcaaggagccccatggtcagaacggccatgacgtggattccggccagggccgtcaccagcacgagcagatagggaaatactttcatccattcaatggagatatccgctgtggagggggactgcacgttccatccgagcaggatgtagcaggccagggccagcagagcggcggggagcgccacctttatgttggcccggaatttgtcccgcatggcgcagccctgcgtacgggtggcggcgatcgtggtgtctgaaatgaaggaaagattgtctccgaagaatgctccccccaccacaatggccgtcatcatgccggcactgacctgcgtggcttgtgccagccctgtggctacgggagccagagcgacaatggtgcctacggatgttcctacggagagggagatgaaacaggaggcgatgaacacgctggcaaacagcagattgtccggaagaagccgcagcgtaagctgcacggtggcgtcaatggctcccatatccctggcagactgggcgaaggctcctgccagcacgaaaatccagaccatcatcaggatgttccggttggctactccggaggaaaacagatccacccgttccgccatgctttttccgcgggtgatgaaaacggcccagacagctgccgccataaaggctaccgtgaccggcacggcgtaaaaatcctgtacggctatggagatgaccaggtaaagcaggaagaaaaccagcagggggctcagtgcccacaggctggctttggcggggggcgtatcctggttgtccggggggctggtcattggagtgaggggagctggccgaaaagtcagttgccgtcggcttccatccggctcagataccaccggtaaatgcgttccactccctcttccagctccacccggtgtttccagcccagggagtgcagcttggagacgtccgtcagcttgcgcatggtgccgtccggcttgtctgcgttgaacgccagatttccccggtaccctgccgtagcggcaatcaggcgggccagtccgccgatggagatttctttcccggttccgatattgatgtggcagttccgcacttcccttcctccttcttgcagctggctgaaatccacttgctccatcacatggacgcaggcgtccgccatgtcttcgctccacaggaattcgcgcaggggagttcccgtaccccacagttccacggaaccgggggtaatgccgtatttggccagcacggccaggatttccttttcttcagccgtgccgtccacctgttccactgggcgcgcgttcagatctttccgcacggcgttccagtctccttccatcaggcacttggccaggtgtatcttgcgtaccatggcgggcagcacgtggctgttttccaagtggaaattgtcattggggccgtacagatttgtaggcatgacggcgatgtagttggtgccgtattgcaggttgaaactttcgcacattttcagccctgctattttggcaatggcatagggttcgttggtgtattccagcggggaggtgagcagggcggtttccttcatgggctggggggcttcgcgcgggtagatgcaggtgctccccaggaagaggagcttggatacgccatgccggaagctttccccgatgacgttctgctgaatctggagattgcggaagatgaagtccgcccggtagcgggagttggcgatgatgccgcccacaaacgccgctgccagaaagacgtattccggcttttcccggtcaaaaaattcccggacggccgcagggtcttccagatccagttctttgtgcgtccggccaatcaggtaggaatagcctttgttttccagggatttccagatggcggaaccgacgaggccgcggtgtccggccacaaagattctgctgttttttttcatctcagaaatgaacgggagtttttacgtatttcatgtcgtggcgcaccatgatgcgcacgagttcctcaaacggagtggaggtagggttccagccaagaagggttttggccttggttgggtctcccaacagttgttcaacttcggcagggcggaaatatttggggtccacttccaccagaatattgcccgtcttcctgtcgcgtccgcgttcttccacgccttctccctcccattccagctctattccggcctcacggaaggccagcgtgcagaattccctgaccgtgtgcatttcccctgtggcgatgacgaaatcctccggtgtgtcatgctggagaatcagccacatgcattccacgtaatccttggcgtaaccccagtcgcgcagggcgttcaggttgcccaggtaaagcttgtcctgcatgccctgggcaatgcgtgccgccgccagcgtgattttgcgggtaacgaaattttctccgcggcgttcgctttcgtggttgaacaggatgccgttaacggcaaacatattgtaagattcccggtaattcttggtaatccagaatccgtattgcttggctacgccgtagggtgaacgggggtaaaacggcgtggtttccttctgggggacttcctgcaccagcccgaaaagctcggacgtggaagcctggtagatgcggcatttcttttccatgcccagaatgcggacggcttccagcatgcggagggttcccacggcatccgtttccgccgtgtattccggtacgtcaaagctgactttcacatggctctgggctgccagattgtagatttcatccggctgcacggtctggatgatgcggatgagagaactggaatccgtcatgtccccgtagtggaggttaatcaggcggtttttcttcatgtcccgcacccattcgtccaggtaaaggtgttcgatgcggcccgtgttgaaggaggaggaccggcgcaggatgccgtgtacttcataccctttgtcaatcaggaactctgcgagaaaggaaccgtcctgtcccgtaatgccggagattaatgcgattttgctcatatggtgtgtcaggttatttgctggcgggagaggttgatgaaatgaaaagaaacctctcccggagccgcaattcatgggctccgggcataaataacgcatttttcccagcgaggcgaggaaaatgctctggtctataggaagggggggcagagccgtcagcgggcatgttgccgcttgctggccgcaatcattttcctgaaatcccggaacagatactggggatccctggggccgggtgccgcttccgggtggtattgcacgctgaatacgggaagcgtcctgtgggcgatgccttccacggtattgtcattcagattgatcagcgttatttccacgttgtccggcacggtgtccggatccacggcaaaaccatggttctgggacgtaatgctgattttgcctgttttcaaatctttgaccggatggttcgctccacggtgcccgaacttcagcttgaaggttttcgctcccagcgcgtgggaaataatctggtggcccaggcagatgccgaacatgggcactttcccaatcaatgcagctacttcccggtgaatgtccgtcagcgtggcgggatctcccggaccattggaaagaaagacgccgtccgggttcatggcaagcacttcctccgccgtcgtgtgggcgggaactacggttacgcggaagccgttttccctcaactggcgcaggatgttgtatttaatgccgaagtcaaaggcgacgatgtcgtattccgcagggggcagagtttttcccgtaaccagcgcgtccacttcctccggtgtcatggggtgggaaccgattttgtccacgatattgcagccttccatggagggggcgtttctggctgcttccacggcttcctccggcgtcagctccgtggtgaggcaggcgcgcatggctccggcggagcgcagatgcttggcgattttgcgggtatccaccccttcaatgccgatgacgccctgtttttccagccacgggcccagggattccgtggcacgccagttggagtggactttcgccagttccgccaccacaaaaccgctgacctgcgctttgcctgattccccgtcttccgggttgacgccgtaattgccgatcagaggataagtcatggtgacgatctggccgctgtaggacggatccgtcaatacttcctgatagccggtcatggacgtgttgaagcaggcttcccccacttccgtgcccgtggccccgaagtgcgaaccgatgaagacgcttccgtcttccagtgcgagaatggctctcatggtgatgtaagtatgcttaggtggtgcgggattaaaggttttgggcgtggtactcctgaatagtgcacacctgaagatttttgttcttcagcgcctcaatggcattcacgcaggcctgtgcggaagccaggttggtgcaataggaggttttggcggcaatggcggaggaacggatgatgatgtcgtccgcccgcgcgtcgtgggagccgggggtgttgatgatgaaatcaatatccccgtttttaatatggtccacgatgttggggcggcgcgcctcgttgactttgtaggcgcgttcgcattcaatgtcgtgctggagcaggtgaatcatcgtgccgcgcgtggcgcacagcgtgaatcccatgtccgccagctgccgggccatgtgaagcacccgttccttgtcccggtcattcacggagatgaagactttgccttccgtcggcaggggattgaatgcactgacctgggattttgcgaaagcgatatccgggtccggatcaatgcccatcacctctccggtggatttcatttccggccccagcaccacgtcgatgcccgggaagcggccccatgggaaaacggcttccttcacgcaatagtattccggagtgatttcccgggtaaagcccagttccgccagcgttttgccggccatgacctgtgcggccagcttggcgaggggcttgccgatggatttggagacgaacggaacggtgcgggaggcgcgcggattcacctcaatgacgtagagttgttcatcttttacggcaaactggatgttcatcagcccgcagacgttcagtttgcgcgccagctccttggaagcccgcgtgatttccttgtgcattttcatggaaatgcccatggcgggaatcatgctggcggagtccccggaatggatgcccgccggttccacatgctgcatgatagctccgatgacggcgcgctccctgtccgcgatgacatccacgtcaatctccacggcgttttccaggaagcggtcaatcagcacggggcgttcttcggaagcttccacggcttcattcatgtaccggcgcagttctttttcctcatatacaatgatcatgccgcgtccgcccagcacgaaggaggggcgcagcagcaccgggtaaccgatgcgcgcggcaatggcggcggcgtcctccacattggtggccgttcctgcatccgcctgtttcagccccagttccttcaacagggcggagaaatgttcgcggtcttccgccaggtcaatggccttggggctggtgccgatgatgggcacgccgtgggcttccagagcgttggccaggttcagcggagtctggcctccgaactggacgatgactccgtccggcttctcctgctcgcagatatgaagcacgtcttccagcgtcaggggttcaaagaaaagcttgtcggaggaatcgtagtccgtggagacggtttccgggttggagtttacgatgatggtttcataacccatttcccgcagagccatggaggcgtgcacgcagcagtagtcgaattcaatcccctggccaatgcggttcgggccgccgcccaggatgaggattttttttctgcctgtttcgcgggcttcattttcatctccataggtggaataaaagtagggggtgtaggcttcgaactccgcggcacaggtatccaccagccggtatccgggcacaatgccctgttccagacgttccttccggatgttttcttccgtggttccccgggccagggcgatttgccggtcggaaaagcccagcttcttggcttcccgcagatccagcttgtccaggctgtcgcccgctctggccaggtcctgcatttgcgccaggaaccagggatcaatctgggtaagctgctgcacttcatccagggaaaatccgttgctgaacgccgtttgaatccagaaaatgcgttccgccgtgggaacagccagtttccgcgtgatctcttctgcggaaggcgcctgcggagccttcgcgtcaaatccccagccccagcgtcccgtttccagggaacgcagggccttttgcagggattccttgaaagtgcggccgatggccatggcctctcctacggacttcatggacgtggtcaggtgttcgtccgcctgcttgaacttttcaaacgtgaagcgggggaccttggtaaccacatagtcgatggtgggctcaaagcaggcgggcgtttcccgcgtgatgtcattccgcagttcgtccagcgtgtagcccacggccagtttggcggctagtttggcaatggggaaccccgtggccttggaagccagcgcggaggaacgggaaacgcgggggttcatttcaatgacaatcatgcggccgttggccggattaatggcgaactggatgttggaaccgcccgtctccacgccgatttcccggatgacggcgaaggaagcgtcccgcatggcctggtattcacggtccgtgagggtttggatgggggctacggtgatggaatccccggtatgcacgcccatggggtcgatgttctcaatggagcaaatgaccacgcaattgtccgcgcggtccctcattacctccatttcaaattctttccagccgatcagggactcttcaatcaggatttcggaaacgggggaaagatccagcccccgggcgcatatctcctcaaattccgttttattgtacgccacgccgcctcccatgccgcccagcgtgaaggcagggcggacaatcaggggaaaggagccgatgtccccggctacccggcgcgcttcctccatggtgtgcgcaatgccggaacgcggcacgtccaggccaatgcggagcatggcttccttgaacagattgcggtcctccccgcggtcaatggcgtccgcgttggctccgatcatacgcaccttttccctctccagcacgccgctgcgatgcagttccatggcgcagttcaaggccgtctgcccgcccagggtcgggagaagggcatccggtttttcccggatgatgattttctccacgaactccggggtgatcggttcaatataagtgcgcggggaggtttccggatccgtcatgatggtggcgggattggagttcaccagcactacttcataaccttcttcccggagggctttgcaggcctgggtgccggagtagtcgaattcgcagccctggccgatgacgatcgggccggacccgatcacgagaatctttttaatggaggtgtctttaggcataatggcgatggaagaatcctgtgatcttggaccgcggatttccgccgggggaattaagtgcccgccgggctccggaggaaagtttttttacggtcaatgacgcggattttcagggtgtggggatcagttgaacatggcggggaaaggaggccggaacagggcgcgccaaggctccggagccgtgccgtcccctgcgggcagaggcttgacccgcgaggggggcataactccggagcccgtcggtgcaccctctaatagatgaacagcatttcccggtacttggggagaggccaggaccggtcgttcaccagggtttctgcggcatcgacgctggttctcaattgggacatcgcaacgaggatgtcctcatggcagctcgtaagcgccgtttccagggtatccaggtcggatacgatggaatccagggcgtcgcccagcttgtccgccagcttctgcagggcggcggtgccgctggtccgcttggcgtccagcgccctggagagcgcggaaacggtttgctcgtattcattgcgcagggcggggagaatgatggtggcagccatttcccaggacaggcggccttcaatgcggatgcgcctgtggtattcttccaggaaaatctcaaacctggattccagctcccgcctggaaaagacgccgtacttttcaaacagggccacattcttttcattcaccagggtgtgcagggccgtcatcgtgtttttcaggttggggaggccgcggcgttccgcttcttttacccattcttccgaataattgtccccgttgaagatgattctcttgtgttcggaaatcctgcgcttgagcgtttcctggagctgcggcaggaatgtttccggagcgaaggaggaaagttcttccgccagggaatcgagggattccgccacaatggtgttcagggtcatcatgggacccgcgcaggattgagatgagcccggtgcgcggaattcaaacttgttgccggtgaaggcgaacgggctggtgcggttgcggtccgtcgcgtcccggggaaggacgggcagcgtgtccacgccgatcttgagcgtatcgttgcgcttgccgcagccggaagagccgttgatcatattctcaattacttcattgagctgggcgcccaggaaaatggagataatggccgggggggcttcgttcgcgccaaggcggtggtcgttcccggcgctggccacggaattgcgcagcaagtcgctgtgtttgtcaacggcctcgatgatggcggtcaggacggtcaggaaaatggcgttctgttgcggatccgaaccggggtcaagcaggttcttgttcccgtaggaaatggaccagttgttatgcttgccggaaccgttgacgccagcaaagggcttttcatgaagcaggcataccaggccgtgcttgctggcctgctggcgcagaacctccatcaccagcatgttatggtctatcgccaggttcacgtcctcaaacagaggggccagttcaaattgcgcgggcgccacttcgttgtggcgggtcttggccgggatccccagtctccagagttcctgttccacgtcgctcatgaaattaaggacgcggggcttgatggagccgaaataatggtcttccagctgctggtgcttggcgggaggtgcgccgaaaagggtgcgccctgtctggaccaggtccgggcggttcaggtagaagttcttgtcaatgaggaagtactcctgttccggccccagcgtgatggttacgtgttcgtccggaaggccgaagcacttcatcagcttcttgacggcgttgcccaatgcctggcgggagcgcagcagcggagtcttcttatccagcgcgtctcccgtataggaacagtaggcggtagggatgcagagcgtggctccgttcccgtgcctcttgatgaaggcggggctggtgggatcccaggcggtgtatccgcgggcctcaaaagtgcagcgcaggccgccggaagggaaactggacgcgtccggttcgctcacaatcaggtttttgccggagaagctcatgatgggttccattcccttggggtccaggaaggaatcgtgcttctccgccgtggagcccgtcatgggctggaaccagtgcgtatagtgagtggctccccgttccagagcccactgcttcatggcatgggccacatctgcggcaatgtccgcgttcagaggaagtccgtcctggatagtggccaggagggtttttgccgtatctttgggcaggtacttcttcatcacttccgtgctgaagacatccgctccgtaataatcaatgctgaccggggcgctttcgctagctccgcccacgggcagggaagcgatggcgctgatggcttgtgttcgtgtcgagtcactcatcatggttaactgttgtaccttttctttagcaagaagcgtgccaacttttcaggtaaatgttctcatgaatatgttgctaattttaatttattgattattagtgaaatatgaatattatggcgaaggggctgcaaaaaagggaaacaaaactgcgcataagaatgaattacaaaaatgtaaaatcgcaacaaaagggtgattacaaaaatgtaaaaaattcttcttggggggaacgatatttttattccgcttcaaaatgtcctgttatgccggcagccgcgtcaggctttgtaaaacgggggtaaaacagtttgaaagcgggaaaatagaaagtctgggcaatgttggcacggtttttgctacgaataagtcaacttaacccaaacaaaacagcaaactgatgaatagcgatcaatttgagacaggcattcccgcgccgcagggattgtatgattttgaacaggagagggacgcctgcggcgtgggcctggtggctgacctgaaaaatgaaccaagccacaaaatcattgaaatgggaattactgttctcaagaggctcatgcaccgcggagccgtgggaagcgatccggataccggggacggcgcgggcattctgctggcccttccggatgaatttttccgcctggcgcttcccaacaagcttcccgccagaggcaaatacggggtggccatgatgttcggcggatgcggccatgaagaggaattggaagccgccgttacggaaaacggcggcagcgtgattgcgtggaggcaggttcctgtggaccgggacagcatcggtaaaaacgcccagcgcacatgtcccctgatccgtcagttgttcattgacggcagtggttttgcggatcaggcggaatttgaacgcaagctgtttgtgatgcgccgggaaatggaacggcgcgtggaaggctgttatgtatgcagctgctccagccgcagcattgtgtacaaggggctgttcctcggcacgcagattgaaggattttacggagatctggccagcgagcatttcaaatcccccctggcccttgtccaccagcgctacagcacgaatacgttcccaacctggagcctggcccatcccttcaggtatctggcgcataacggggaaatcaacaccctgcgcgggaacctgaaccacctgagcgtgcgtgagccgcatttgtcctccaccctgctgggggatgacctgcaaaagctgctgccccttattccccccggccagagcgattccgcctgtctggacaacatggttgagctgctggccgccgccgggcgggacctgcgccatgtcatgctcatgctcatgccgcaggcctggggcgtcaactaccatttagggccggatgtgcgcggtttctttgaataccactccgccatgatggagccctgggacggtccgaccgccgtcgttttttccgatggtatcaatgcgggcgccatgctggaccgcaacggcctgcgccctgcgcgctatacgctgaccacggatgatattttcattctggcttcggaaacgggcgtggcggacattcccgcggaaaaagtagcccgcaaaggccgcctccgtcccggggaaatgatttactgcgacctggtgcaccaccggctggtatccgatgctgaaaccaagaatgaaatggccaggcgcatgccctaccgccgctgggtggagaaaaacaagatttccgtccgttccctgtttgattccatttccgcctctgcggaaatgccggacctcgtgggccgccagcgccagttcggattcacccaggaggatgtggagctgatcgtccgccccatgatgctgaaaggcgcagaacctctcggctccatgggaaatgacgcgccgctggccgtcctctccggaaaggctcccctcctgttcaattatttcaagcagctcttcgcccaggtgaccaaccctcccatcgaccccatccgggaggagctggtcatgagcctgaccacatacataggcaaccatcccaacattctggaagaaacgccggagcatgcccgtcttatcaagatggcgcgtcccgtcattacggatgaagagctcaaccgcctctgcaatattcgggaggccggctttccctccgccaggcttcccctccagttcccggaaggcggggacgggaaagccctgcgggagacgctggaaagcctggcggaatccgccgtgggcctggtcaggtccggcgtgcgcattctggtgttgacggaccgcaacataggaaacggctaccttcccgttcccagtcttctggcctgttccgtggtgaatcgcgcgctggcttccgccgggctgcgttccgacgtggggctgattctggaaaccggggaggcgagggaaacaatgcattttgcgcttctgctgggcttcggagccacggcggtcaatccgtacctggctctggcgacggttacttccctggccgcgccgcaggactgcccgctggatgtggtgaaagcctccggaaactacatcaatgccatagacaagggattgctcaaaatcatgtccaagatgggcatttccacgttgcgcagctaccgatcctcccagctgttcgaggctgtggggctgaaccgggaactgattgacgaattctttcccggcaccgtcagccgcgtaggcggcatagggctggatgaaatagccgcggaatgcaaccagcgcgccgctcaacacgcggaacacggggacaagctggatgcgggagggcagtacaagtataaaaaaggcggggagaaccatctctggaatccgcagacgcttcaggctttccgcgctgccgtgcgtgacaatgacgaacggaaataccgggaattcgcggattacagcaatcggcaggcgcagcatctctgcaccctgcgcggcctgtttgaatttgctccggcggacgctatccccctggaagaagtggaaagcgtggattccatcttgcgccgtttcgtttccggggccatgtctttgggttccctcagtccggaagcccatgaaaccatcgccattgcgatgaacaaaataggagccaaaagcaattccggggaagggggggaagatgaagcccgctatgaacccaacgcccggggcgaagttcgctacagcgccatcaagcaggtggcgagcgggcgttttggcgtgactattaattatctgcgccacgcttccgagctccagattaagatggcccagggggccaagcccggggaaggggggcagctcccggcgcacaaggtggatccgtacatcgcccggcttcgccattccatgccgaacgtcagcctcatttctcctcctccgcaccatgacatttactccattgaagacctggcccagttaatttacgacctgcgcaactccaatccggatgcccgtgtctccgtcaagcttgtttccgaggtgggcatcggcgcggttgccgcgggcgtggtgaaggcccatgcggatgtggttgtggtcagcggccacgacggcggaacgggagcttctcctctcaccagcgtgaagcacgccgggctgccgtgggagctggggctggcggaaacgcagcagacgcttgtgcttaacaagctccgttcccgcgtccgtctccaggtggacggccagctgcgcaccgggagggacgtcgtgatggccgccctgctgggggcggaggaattcggttttggaaccgccattttgatctccatcggctgcgccatgctccgcaggtgccatgaaaatacgtgtccggtaggcgtcgctacgcaggatccggccctgagggccaaattcagcggcaagccggaatacgtcatcaactacctccgctttgtggcccgggaaacgcgggaaatcctggcttccctggggcttcgttccctggatgaagccgtaggcaggacggatctgctttccgtcaaccgcgccatagatttttacaaggcccggcatttggatttctcctccatcctgcatgcggcagagggggatggacgcaggtttgacccctcttttgaaaaggaaccgctggacaactacgaccgccgccatctgctgccggcattgaagcccctgctggaaaagggggaaaagacggaactctgccgagacgtcctcaatgtggaccggacggtggggacggaactttccggtgagctggtgatgaaattcgggccgcgcggcctggcggaagatacgcttacggtgcactttaccggatgcgcggggcaaagcttcggggcttttctggcgcctggcgtcacctttgaacttgtcggggaggcgaatgactttgtcgggaagggcttgtctggcggcaaaatcatcgtgctccccccggatcatatctcctacgtaccgtcagacaacgtcatcgccggaaacgtcatcggctatggggccacttccggcagcatcttccttcacgggcaggccggggaacgtttcgccatccgcaacagcggcgccaaaatggtggtggaaggcatcggcgaccacggctgtgaatacatgaccgggggccgtgtggcggtgctcggcaaagtgggcgtcaatttcgccgcggggatgaccggcggcctggcctacgtgtatgatgcggacaacaacttcgatcagaaatgcaacctgggcagcgtggacctggaaacggtcatgccgcattccgccgatgaagcggaattgcttcagctcatttacgagcattacatggctaccaggagccgcagggcttacgacctgttaaacaactggccggaagaacgcggcaaattcatcaaggtattcccggtggaataccggcatgccctggccatgcattcctgaaagaagcatgcagcagttttctgttgtttggggtaaggcaggggcctccgcgggtgcggaggcccccattttttgataggcctgtatgccgtttcatggccgggcatgttggcgccgcttttcctgcttaagccattccgcatttgaagacgaatgttccggataaggaggttttcatgaccatactgtcagttgatagagaaatgcggctgcgagggggatggtggttgcagttgatgtcaggaggaaggtcaaatgttccagcaatgcccggttctgagcggattatgaattcgaagtcaacaggaaagtttgaatggaaatgtgttagtggagttttggttttgggaattcgtctggatggcaattgataaaaaagtgaattgaaaggtaactgattggtattcttgttatttagttattcaggggattgccgcgaattcataatccgttaggtttgctccaacgggtgtttggttttttctgccaggctgctccaattaactacacaatgaatatatgacgaggaaaaccggccctctctatcaggagagggccggttttttgcaggatttccgtaagggaattcctttttcttattgaggcttgtccaacaaaatatcttttcctgcgcctttccatgaaaaagcgtggccgcggaggcggacgcatttacggagatggaaggaagagcaaagattcctactttttaggcgttatattgcgcatgttgcggcctttagccttgcgctgctgttcttccagggccgcgcgctgctgctccatcatcttttggaaaaaaccggcctttttctttttggcgggagagagcacgggcatgggcaagcggcggataagggccgtttgccctatggagatcaaattctgcgtggtccagtacagggccagggcggaagcgaaattgtaacagaacaggaagaacatcacaggcatcaggttcataataatgcgctgggagcgttcccccgcctgaggagtcatcctcatctggataatcatggttacggccatgataagaggcagaatattgatgggaatgccgaacaggtggcccacggtatcaggcagggagagatccgtcatccacaggcagaagggctgtcccctcagttctgcggaatactggagcactcggtagaaggcgaagaagatgggaatctggataagcatggggacgcagccgctggccgggttgatgccgtatttctggtacagcttcatcatttccatgttcaccttctgaggatcgtccggatatttctccttgagtttgaccatctccggctgaaccagagacatgcgtttcatggccatgtaggattttttgtgcagcggccagatgagcgcgcggacaacgatggtcatgcagatgatggccacgccccagttaccgaaccacccgtggaagaggttgagcagccagttcatcggaacgctcaggaacacaagccagccatatgccatgatgtcgctgatggcaggataggagagattcaggtcacgcagataagcgttcaatttggggccggtgtaaatatcgtaggtgagtgtcttgatttcattgggggccatggtcaggttggggattcccatggccacggtgacgccgggcaccagggtgttgccttcatgcgtcagagggaattcctggcgggtggcgtacaccgtggatcccctggactgggcctggggaagaaggatggtggcgtaatattggctcatgacgccggcataagtcagatcctgaagagggccttccagaacgcgggctttggcgctgctgaaaaatccgcccgtgaaataggaaggcacttcctgttccagggagccgtccgcatggtaaaagaaatgggtgtaggtatctttgggttcgcttttggcgatggggtaggcgctcccgccaaagatgcccatgtagcgcagatcctggacattgggagatttattgagcagggaaacggtcaggcgaatgaggtatttgctgccgggcagtacttccccttccagatttttgacggggtgcagggtgtatgttttggagatgaaaagctgccgtgcggggtcatagccttccagggttacggagtccgccgtgcgtttcacttccttatacacggtattgtcataggaaggatcttgggtggcgtccatattgaagacgagttctccgatgccccgctgctgggcttcgttgatcgtgatgttatggttcgcgactttttgggagtccacaatgtcgttgtgcagggtaaccgtgccgatggagccccctatgcggttaaacgtgtaggtgatgaaaggttcctgcctgccgttcatttcctgcgtggctaccagagtgatcggggcggttttgtcttcttcgagggctttgttgacggaggcctgttccggggcggaggtcccggctccggggtggacgccggtaaccggggcattggctgcggcggcagcctgcggtgcgggaatgggggcggtttcagcctttttattgttgcccatgtaaatattcaggcccagaagggcggcgcagatgcctatgatgatccatgctgtgcgatccataatgtgatatagcttgattggagttggtgaaaggaaaaggaaagaagggtaattgatcagcgtggggggcgcgccgggggcacgggatcataacctgatccgccccacgggttgcatcttaaaatacgccatgagccaagaagaaagccgcgccaggcgccgtggatgcggacggcctggatgaagtactgggaacaggtgggtgtatagcggcagccgcttccgggtccccccagggcatgcaggggggcgctgatgaaggtttggtaccccttcacaagggtgatgagcagccatttcatcatgtcttgtcttgttcccgggaaagaagttgcagtttgagcttgcgtgcagctttccgccagtcccgttccaggtcggcgtagctggcttccacggccctccaacggaggacgcacaccaggtgtacgccgttttcaaaaggatccccgtgatccctcagtatttccctcacgcgtctccgcagtttgttgcggacaacggcgcatccgatttttttcgtacagatgataccgaatttggagggttcctccggatgttccaacggggccgcgcttaaaacaataagccgacctgctacggatggcccctcgttgcgtacccgggcaaattgaaatgccctggtcatgctttgttgacgagtaagacgcatctcccgcgggtcggcccgtgaaaagaaagttccaaggaggcgttaaccgaatcctggcggctggattaacggccgtgctggatggtgtggcgcttgtactggatttcggctcccttgggaagcaggcgcttgcggcctttagcgcggcggcggcggatgatgtccgctccgttcttggtggccatgcgtgcacggaatccgaactgacgcttgcggcaacgcttggatggttgataagtcctcttgctcatgatgttgaaagatgcttcttgtgaattactagattcagtgccgtccgtctaagcggcctatgcacaaccggacggaaaggataactattttgattgttttgtcaatccgtcaggcgattaatttgccgtttttcttgcggaaagccctgggataagtagtctttatggttgataggcagtgtgtttctatttcagaaaagcccgcctgctttacagaaagagcagttccgcgtatgtgggaacgggccacaggtctgcgtccgtcaggctttccagcatatcaatggtgcttctcaaattgtccatgcccgcctggatggccctggtatcggcttcatccacggcgcggcgcagttcccgcacctgtccggggagaatatccagcagcgtgccgatttggttggcgcggtccgtagtagctttcattcctgccttgattccggatgccttcatctgggcaatggcggtggtaagctgcgtgagctgttccgttacggcggggatgtaaagggtttccaccatcaggagggccgtttccgcttcaatgttgatttccttgtggaatatttccgtctggatttcatggcgggcgtggagttctacggggctgaccactttgtacttttcaaaaagcgccttggccttgggcgtttccagagcggccagggcttcaatggtgccggggatgttggggagattgcggcgttccgcttcctctacccaggcttctccgtagccgtctccgctgaatagaatgcgcttatgcttcttgatgatgttttgaaggagcttgttgagggtggcgtggaactcctcgggcttgtccttgacaggttccaggatggtgcagatttcatccaggctttccgccacaatggtattgagcaccgtcatgggccatgcacaggtttgggaggaacctacggcgcggaattcgaatttattgcctgtgaaggcaaaggggctggtgcggttccggtcggaggcgtccagagggaacatgggcagggtgtccacgccgatgttgatggtcttttgggtgcgcgcttttttagtgcctcctttctcgatttgctcaatgatttcatccagcagatctcccaggaagatggaaatgatggccgggggggcttcatgggcacccaggcggtgttcattgccggatttggcgacggaggcgcgcagcagatccgcatgttcgtccacggccttgatggtggcgcagagcagagtgaggaagatggcgttttcctgcgggctggaaccgggattgagcaggctgccgtaaccgggggcggagagggaccagttgttgtgcttgccggagccgttcatgccggagaagggcttttcatgcagcaggcagaccatgtcatgcttgttggcggttttccggagcacctccatgaccagcatattatggtccacggccaggttctggctttcaaaaatgggtgcgatctcaaactggccgggagcgacttcattgtggcgcgttttggccgggatgccgagtttccagagggcttcgtccacgtccaccatgaattccagcacgcggtccttgatggagccgaagtagtggtcttccatctgctggtgcttggggggcacattgccgaagagggtgcgcccgcacatcatcaggtccgggcgcagggcataaagctgcttgtccaccaggaagtattcctgttccgcccccaggtcggcgctgacgtgaatgttgtccggaccgccaaagcaggacaacagccgcttggcctgccgggtgacagcagtcatggatctcaggagaggcgtctttttgtccagcgcctgtcccttgtaagagcagaaagcggttgggatgcaaagcgtggcgccgttttccgtccgtttgataaaggcggggctggtggggtcccatgcggtgtagccgcgcgcttcaaaggtggcgcggagacctccggaagggaagctggaggcgtccggctcgccctgcaccaggctcttgccggaaaatttgagttccagatttccctccgggtccacgtccacaaaggagtcgtgcttttccgccgtgctcccattgagaggctggaaccagtgcgtgtagtggctggcccccttttccagagcccacgtcatcatggcctgagccacttcattggcgatgtcggggtccagtttttcgtccttgcggatggtagccagcagttttttgtaaacggggcggggcaggtaattgcgcatggtctccatgttgaagacatcctgaccgtaaatttccgcaataaaggttgcggcgttgccaacatcggaaggtgggtttgtatgcatcttgatagggaacgcgccaaaaggctcggaacataccaaaccttaaaagagactttttggcaagccgaatcctgccctatttcttcaggaaaaggacttcttccgcccccatccgttttcgggaagaagcgtaaacggttttccggtttctatggttctccggcggcaatggagaaattggggaaggagggggacgctgtaaaggaagggataggccgtgattgtcgggaagaggactggacgggaattggtgaagtgccgggtttttgtttcatgaaacggcacaggaacctgccgagcggtatttttccgtatcttgcaagaaatctatttcgttttcagtagtaataagtacaaccatattattgtgaaatgcgtttattgttaatagcaagatgtttattgttgatgctgctgtgttgtgcgggagtggggatgcggcttcatgcccagcctttgaataagggccggattgccattcttggggacagtattgcttatgcgggaccatgggcaaatgaggtggaaaacgccttgaaagccgataaaaagtttgaggcctgcgagattgtcaactttgccgttcccagcgagacggtagccgggttgagcgagtatggccatgcgggtggcagattcccccgtccatgcctgcatgagtgccttgaccgggttctccaaatgtaccggccccaattgattctggcatgctacgggatgaatgacggccttatgcaggcgtttgacaaagcgcgttttcaagcgtaccaggaagggaatatccgccttaaaaaggctgccgatgcggcaaaagcggagattgtcttcattactcctccattgttccggggggattccgctgagcaggctgagtatgacgctgtattggacaagtacgcggaatggctggtttctaaaagaaaagacggctggaaagtcatagatatccgtcccgggcttcggaagctcattgccagagagaaggccgggaatcccggtttcaggtattccggtgacggcgtacaccccggtccggaagggcatcatatgatagcccgggaagttcttgccgggctggtcccggaaataggccttgctcctgaggttgcggaaaaagaccatcggccgacgccggatacgatgaaaaaacatgagaaagtccgcaatgaatggctggtaaaaacaggacatgcacggccggaaattccggggtatgatccggaaatggccaagcgtcagtttcctaggacggtttctgtctggaatggttttttacgggaggagtttaccgtgggcggccgcagggcattcatcgtctttcccgacaaggctgttgtttctggaaaagaacagttatggatatggcggccacaattttttgattataagcctatagctgatctcgaactggtaaagcgcggctatgcggcggtatttatcagcatggaagacctttacggttctcccaaggccatggaggtgatggatcaattttacaggtatctggtggatgaacgcaaattttccggaaaaccggtgttgtttggactgagtcgtggaggactttatgctctgaactgggcggagaagaatcctttgtgcgtggctggcgtttatgtggatgcccccgtctgtgatttcaaaagctggccggccgacagaggcaagggcaaaggttcgccggatgactggaacaaatgcctgcgcgcctatggctttaatgaacagcaggctttatcctataagggcaatcccgtggacaatatgcgcggcatggctaaagccggaattcctttgttgtttatttcccggacggaagatgatgtagtccctattgaagagaatacggatgttttcgccaaacgttacgccaagctgggaggccctgtaaaagttattcgccgccccggcgggcaccatccgcacggttttgacaatcctgcccatatcgtagattttgttctttccgttaccggacagcccgtccctttgcgcgttgcgtgcctgggagacagtaatacttttggagcaggagtagccggagccaataaggatgttttgcgctggagccatcttcttggtcaagaattgaggaaaaaattcaaacggaaagaaatagaagtgctgaactgcggcgttaacgggcgtacccttctggccaagggagaccttccctatattaaaacaggcgagtaccggaatgctctcaattcccatgcacagattgccattatcgctttaggcaccaatgacgccaaaccgcagaacaggaaattcctgtccgagtttaagcagaattatgccgccatcatcgccgaactgcgggaaaatatgcccggcattcaaatctattgcgcaattcctcttccctcgtggcaatcttccagccaaattgacaaggaaacggtggaaactaagatcattcctcttgtgaagcaggttgcgagggacaataagtgtgaaaccatcgactttttctccccttttcagaataaaccggaacttttccccgatggcgttcatcccaatgccgatgggcaggtgattatggctgacattgcattcagggaacttctgaaaaaacaacctttaattcaataaacaaaaaaataatgatgagcgctaaactatcggtaattacaggttcgattctcctgctgtcagccccgttgcagggattttccgcgacaacccatccggattcctgcatgaaccgggattggaaaaaagagattccccttccggtgtatccaaaccgggaaatggtggatctttatcataagacatgggaaattgcggcaggccgcgtcagaaaagggccggaaggccttcccgcgtctccctacatggatgagaattgctatgaagatcaaatatggatatgggatacctgtttcatggttcttttcgccaagtatgctcccaggtcgtttcccggagttgaaagtttggataatctttacaagcctattcacgaaaaagccgttactccgcttaaggttcatttagtggacaatcccccgttatttgcgtgggtggagaaagaatattttgacttcaccggtgataaggaacgcctggatgatatcttgaataagaagcaatatctgcaaaagcatttcaaatggtttgcccgggctaaggctggtgaacggtttgagtgttccccccagcgtatttacttgaattccattggggatgatggctttacctggacagggggagcgagcggtatggacaatactccccgtgggcgtgatgccggaggataccataaggtgttatgggtggatgccatttcccagcaggctcttagcgcccactgcattgttgccatggaacaggctttgggaaatgaagatgaagcaaggaaatggaacgccgaatatgaagcgcttaagaaaaagatcaaccatctttactgggatgagcgggatggattttattacgatgtcaccattgcggacaaacagccctgccgcgttaaaaccattgcgtcctactggcctcttctggctcaggttgcctccagggaacaggcgcggagcatggtcaggcatttgatgaatcccgaagaattcggaggcagttatccgactccttccctggcccgctcggataaggattatcatcatcaaaccggggattactggcggggaggaatctggctgccgacgacatatatggcgattaaggccattgaaaagtatggctaccatgaggaggccgatgctattgccgagaaggttatcaaccagcagcttgccgcttacaggaacatagaaccgcatactatctgggagtgctacagcccaagcgggaatactccttccacggaacacggacgccgcgcaagaccggaattttgcggctggtcagccctggggccgatttccctgtttattgaaaatgtactgggatttaaggaggtgtccgcaaccagaaaagaagtgcggtggaggttgaagaaaaataagggccgccatggaatcaggaatttgaggtttggcgatattgtaaccgatattgtttttgatggtaaaggcacggtgtcggtcacgtcgaatgcttcttactctctaatcattaatggcaatacttattcagtaaggaagggggatactgaaattaagctgtaaggaccttctgtttatccacggaagggcgtcattgatgttcttccgcggggtttttccttttgccggggcaagatgcgggtttttcccgtgcctgcgccaatttttttcttttggaggcggtctgagaggcaagggtgacaaaggaaattccggaagggcggcaaggaaatgttccggaacattatttgagaggtaatgttgtctgccgttttaacggggagagcaggcttcctccatatgccttacggaaattttttggtaaagggtatgggtttgtccgggggcgagggaaatggaacggggctccgcgtttcccgtttcaatgcacaggaatttattccaggactccgcacccaggtccgccatgtttttggcgccctgttgtccaggattccagacgatgacggaagaggcatgattccgctccaccgtgatggcgcggttcagcatgaggtcttccagcattgtttttcccgaacaggaggggaagttgtaaacgcggtccagacaccccagcggcgccagcgggcgttctccgtgcttcatgggctgggcggcttcttcccggaacgggatgtcctccagcccatgaacgcggcatttggtcaggttgccgacggcaaagtagttgtggaaggcttccgtgagcttgcagggctgcgtgcgcgccgtggtttccagcttcatggtcagcgtgcggcccagggtaagacgcaggatggcggcgggataggattcatcttccggatagaaagccagggagagcaggacgttgccgcgcttgtccatttcctggtggtggaggcgccattccgaggtgcgcgctatgccgtgggacggcgcgccttcccggggaccgaaccagggccagcagacggggatgcctccgcggatggctttgccggggacaaaggctgcgttgggagaaagaaaaaggcattcctcatgccctgccggcttccatgaggtgaggtgcgctccctgaaggcacagggatgccgtgcagagcggtgttgttacgtccaggaaagaaagcccctggtttgttgtgcgccggacggtcatggctgaaggcgttcaattgtccaggagccgttttcctgaagtttgtacatgaaacggtcatgcacgcggccggggccgccctgccagaattcaaaggtatccgggataattcggtagccgccccagaaggagggaaggggtatttctcccttggagaatttgtttttcagttccatcaacttcatttccaacagttttcttccggaaatgacggagctttggtgtgaaacccaagctccaagctgggattccttggggcgggtgaggaaatatttcagggattccgcgcgggagactttgacggcttttccgtaaatgatgatctggcgttccagcattacccacggaagcatcatgcagacctgtggattttcttcaatatcgcgggccttgtggctgccgtagttggtgaagaaaacaaagcccgtccggtcaaaatatttgagcagcacggtgcgtagggagggcctgccctgggcgtccgccgtggccagggaaaaagcgttgggttccggaatatccgctttcaggacctgttcaaaccaggtttggaattgttcaaagggattttccgccaggtcctttctgtgcagctggcctttgaggtattcttctctgaaattggacaagtccatggcgtgttgaacgatgaggggttattctacgctgaaatccagccccaggtccagggagggggccgagtgggtcacgtagcctacggagacgaagtccacgccggattccgcaatggcggctaccgtatccagatgaacgcctccgctggcttccagcaggggggtggtgcgtcctccgcgcatggcgacggcttgtttcagcatttccggcgtcatgttgtccagaaggatatggtccacgccttccagtttaaggaagttgcccacctgttccagggtgtccgcttccagctggatttccacaccgggcttttcctgacgcagcctgttgatgcattcctggaggtgttccgtatttccatccgtcatcaggtggttgtctttcaccatggcgcggtcataaaggcccatgcggtggttggtgcctccgccatggagcacggccgctttttccagcagacggtagccgggagtggttttgcgggtatccagaatgcgggcgctggtgtgggaaacggctttcacatattgtctggtgagcgtagctactccggaaagacgctggatgaagttgagggcggtgcgttccgccccaagaatggagcgggcggaaccttcaataagcatcaccacggcgccgggcgccacggcttccccgtcatgcaggtaaacttccaccttcagggtgggatccaccttgcggaaaacttccgccgcgacattgacgccggaaagaacgccttttttccggggggtcaaaatagctctggctgtcagatgttccgggacgaagtatgtggaagtcacgtcgccggagccgaagtcttcggccagcgccagattgatcagggtttccacgttgtcggatacggtttctgcgggcatgaaagaaaagcggcttaatattcgcggttaagaagatagttggccagttccaccaggcgggcgcggcgttcttccgggaaaatcatcagggcatccagagccgcctgagtgcggcatttggcttcggaacgggcgccgtccaggccaatcagggccggacaggtggatttctgggaattgacgtccttgccggcggtcttgccgagtttttccgtggaagccgtcagatccagaatgtcgtcaatcacctggaaagccagccccaggttgtaaccgaagtccgtcagagcttccagctgggactccgtggcgtttgcggacatgccgccgaagcgaagggccgtggttagcagggcggccgtcttcccttcgtacacggtgcggacttccggttcggaaagctgcttgtgttctccctccaaatccagaatctggcctccgatgagcatggtgctgccgccggtggctgccagctccctcacgtaatccctgacggtatagcgttccgtatcgtccacctgggcgattacggcaaaagcctccgtcagcagcgcgtctcccgccaggatggcgacgccttctccgaaggccttgtggctggtgggtttcccacggcgcagatcgtcgttgtccatggctggcaggtcgtcatggatgagggaatacgtatgcatcatttccacggcgcaggcgggaaccaaggcgtccactgccagtcctccgcaggcctctgccgccgccaggcaaaggacggggcgcattcttttcccccccgcaaatatgctgtagcgcatggctttgtggatggtttcggggctttcgttctctgctggcagcagtctgtccagcgctgcgtcaatcagggcgcattgttctgtgatgtagtcgttcagtgattgttcacacatggcgttatggaataggtgcggggtgtggaggaaacaggtcagcggttgaccagcaattccgcgatttgtacggcgttgagcgcggccccttttcggacctgatcgcccacgacccagagagtcagggcattgtcaatcgccatgtccatgcgcatgcgccctacgtagcaggtatctccgttggtgctgtccagcggggtgggccacacgccctccgctgggttgtccatcagggcgactccgggtttgccttcataggcgctgcgggcagtttccaagtccacaggtttttcaaactgggcggtaacggagatggaatgggaacggtaaacgggcacgcgcacgcaggtgcatgttaccttgagttcgggcagggaaagaattttacggccttcattaagcatcttaagctcttccttggtatagccgttttccgtaaaggaatcgatctggggaagaagattgaaggctatctggtggggataaacatttttcactacgggatggccgtccactacggcgcgcacctgggtttccagttccgcaatgccgtgctggccgctgccggaaaccgcctgataactggaggcgatgacggttttcaacccgaaacgctgatgcagagggaagagggccatcagcgtaatgatggtggtgcagttcgggttggcgataatattgcgggggtggttgaaggccgcttccggattgatttccggcaccaccaggggcacgtccggctcctgccggaaggcggaggaattgtcaatgaccacacagcccgcagccgccgcgataggagcgaatttcagggaaatgcctccgcctgcgctgaacagggcgatatccaccccatcaaaggatttttccgtcaattcttctacagtcagcattttcccacggaaagcgacctgttttccggcggaccgggcggaggccagaagcttcagggaacctacgggaaaattgcgtgtttccaggcaggacaggatttcaacgcccaccgctccggtggcgccgacgatggcaacatggggtgcttggttcatgattgttgtcagaaaatgacggatattttccgtccgcccccattatacggcagcccggtcatatggcaatacgattgcaagccttcaggcttaaaaatgaaaaactgtccgagattttacaccccggacagttgttgaaaaacgggaaagatcgcgttttttatttcagcgcttgcggcgcagcatcagcagggacaggcccaaaaggctcagggatgccgtagccggttccggaacgacatcctcagcagtggctgacatggaaaaaagcaggttggagttcgtgtttccgccgccattgcgggtggacatcacgatgtaagccgtgtcgctggtaaggggagtaccgctcaagtccacggacagggtcatgcctgtttgaatcagagaagaggcctggccggtcaactggctgatctgccagccttctgccgtctgataaacgatattgagcgtcgtgaagtttgctccggattgcagcccggcgcagtccacggaaagagtcaatccggtataactggcgtaatcactggtaagcgttaccgctgttcccacgatagagccgccgtaagcatttctgttgatgaaagacacggatacatcagtatccccggatgcggtgacgctgccgtaaataccggagccggaattgccgtttgcagtagtgccttgccagccggtggtgccttgcaaccatgtgacgactttttgtgcagtgatgacatttccgctgttgacgtctccgaatccagacaatttaaggtttgcaggcagagatgccccttcggctgcctccccatttaggtcgattgctacggtggcggccatccctgcgccgcaacacaaagccataagaccggaaagaaataatgtgttcttcatggttgttcgttgctcttttttattgctgtaatttgccgggctgtcttgaacccgctcatgatgaataaagcggattttcaatccgatatgccctgaaaatagtgcatgagtttctctttctgcagggtacggactgtttcctgcggctgttgaaacggacattcccggcagatgtaccagctttcagggaaaagagttctccggttttcagacttatcttgagcagtctcaaaagctggcggcggtttctgcacgggtggatatttcggcaggctttccgtatgcataaaaaggttttcaatgatgcaataaagttcggcacaaattcttggttatcagaatttacgcttgacttccggattgaaaatccggcatatcctcgctttccatgaaaggcaacaaaacaggctcccgattttagggagcctgtctttaaaggaaagagcggtgcaagcctgctatttaacccattttcccgcgccttccggcagcctgccgtcagagacggggccgtagcgggtggattccgtgttgccccagagggggacgcctacgatgcgtttccaccagcgggacatgctggctcccgtatagcagccgaagctccagcagtcggactgcggcgtgaaaatatcccgccgtatcctgttcaggtccgtctcatggatccattccgtggaaacggccatgatattgttgccgtagtccagcatccacgcatagcagttggaatggccgaagtagtaaaaggattccaccttgtcgccgtggaagcgcggggaggaattcagcgcccggatggcctggtcggcgctgtttacccagacgagcctgattttatacttggaagccaggtccgcaatccagcgggtgtaaggttttccgtcttccttcccccgggttgcgtaaccggggcggtaaacaatccaggtgattctggcggcaggatcttgctgctggatctgggcgatgcggatggtggaggcccttacaaagttggcccaccagttgtcatgcctgtcaggctgtattctcagcccttcccattgcctgagtgcggggccgccgcacatgacgacgtgaacggcccgggacagtcccgtgccgcccagcaacagggccagagcgagaaaaaggcgtgaaagcatgcccgcaccctacctttgctccccgtatctgtcaatccggcggagcgttttttgcgggaacagacgcgcgtgaaaagacaagggagggggttcatgtaccctcagcaattcaccacgttgacggccaagccgccctgggcggtctccttgtatttggattgcatgtcccttccggtgtccagcatggtgcggatgaccttgtccagcgggacaaaatgagcgcccgtaccgcccagggccatgcgggcggcgttgatggccttgatggcggcgatggcgttgcgctcaatgcagggtatctggacgaggcccgcaataggatcacaggtgaggcccagattgtgctccatgcctatttccgcggcgttttccacctggtggggtgttccccccaggtactccgcaagagcggcggcggccatggagcaggctacgcccacttctccctggcagcctacgtccgcgccggaaatggaggcgtttttcttgtacaggatggcgattcccccggcggtgagcaggaagcgatgcacggcatccggatacggggaaacgcagaatttggtggcgtagttaagaacggccggaacaattcccgccgctccattggtcggagcggtgacgatgcggccgccggccgcgttttcctcacttacggcaatggcgtacagattgatccagtccatgatggagagagggtctttcaaggctgattctccgtgcaccagaagattcttgcgcaaagttttggcccggcgcggaacctgcagaacgcccggcaggttgccgcgcgcgctcatgccgttggagatggactgcttcatcgtcgcccagatcaggtccagtttttcacggacttcccgttccgggagcatggcgcattcgttcgccatgacaatggaggaaagagggcatccgcgctcatcagccatatgcagcagttcctccgcggattcataaggaaaaggaaaggtttcccggtccctttcttccggatgcagaagttcctgttcggaagagacgaacccgccccccgtggaataaaataccgcgtcttccaccgggtctccgtcctgattgacggcagtaaactgcatcccgttcggatgcaggcgcaggggctggtagtgggaaagatccaagtcgcgggaaggagagaagcggacgtttttttcttccgtgacggacaacgtttcctgctggtgcaggcgggcgatttttccgggaatgctgcgcggctccaccgtatggggttcttcccccagaagccccagcatgatggctgtgtctgtgccgtgcccatgtccggtggcggccagggagccatagcattcgcagcggatgcctgagatttccgccaagcgcggggagtggcgtatctgttcaagaaagcggtgcgccgcccgcatgggccctacggtatgggatgatgaaggacctatgccgatgctgaaaagctcaaaaatgctgtaatggtgcatgtccgttttcctgtagcggggaagggccggaattcccagcgggatttccggcccttcccgaaagatgggtttacagccccagcaggtagcgttccgcttcaatcgcggcgctgcagcccattccggaggaagaaatggcctggcggtagtgaggatccgccacatctccggcggcgaacaatcccggcgtcctggtcgccatcatccctgttttccggataatgtagccggcatcgtcccggtccaccagatcccccaggaaagaagtgttcggcgtgtgcccgatcgccataaagacgcatttgacgggaagttccgtttcatccccttctactacgtccttcagcatgacggcttccagttctcccttgtcgtccgtcttatagcttacgatggtggaattccacatggggaaaatcttttcattggacagcgttcgttccgccatgattttggaagcgcggagcgtgtcgcggcggtggatcagatacacccgggaagcgaagcgcgtcaggaacatggcttcttcacaggcgctgtctcctccgcctaccacgcacacaggcacgtcccggtaaaaagctccgtcacaggtggcgcaggcggtgaggccgtggcctaccagcccttcctctcccgggattcccagatagcgggcggatgctcccgtagccacaatgatactccgggtttcgtaattctggccgctggtcttcacggtgaacagtccggtggcttcatccctgacgacgctcttgacgtcctcatatgcaaaccgggtgccgaacttttccgcctgctgctgcatcaggaacatcaggtccggccccatcacgccgtccggaaagccggggaagttttccacttccgtcgtggtggtcagctgtccgccgatttgggaacccgtgatcagaagcggagagagattggcgcgggcggtgtaaatggccgccgtgtaaccagcgcagccggcaccgatgataatgacttgttcgctcataatagtatatatgtccgttgccatggtaaagggcccgtgcccgttttgcgagtagattttgcgctatgcggagacaatgcagaggcctgcaatccggcagttgcgggacgggttccggcagtggcggaaaagaactgcctgcatgtatccctggcgacggtctgcaatattctggccctgtctgcgggaagattgcttagccgcgtccctttcaaggacaagcggcccggcaggcccagcggagattttccgaataacgtgaagtagattacgcatgccgtcaggtagctcccttcctccgtcgggtgccggccgtcaggctggtacagctgaatgcctggatggcgtttgaggcaattctcccaggcaatgcccacgggggcaagcgctgctttttccctccgggcaagtttcaaatacgtttcaagaagagccttttgctcctgcgggtccggagttccggaagctcctcttttcccccacgtcagcatcaggatgggcgttcctttggcggctcgtaccagagagcaccatttttctccgaactccatggttcgttccggagcccggacaggtgtagcgctttggtcctggagaataacgaagtcccatgccgttccttccatgttgttgcgggcacgcctgtcattccaatgggactggagggatgctgccggagccgcgtacatgtgcacgtccggccgcaatcctttggtgtctgccatggctttaaccatggcgggcatgcggttgaaaaacgtatagctgtttcccagaaagagaatacggctgccggagcgtgcaggaacacagcacggccaggagggggatgcgggcggctcttcccgggcctggagagggcgggggaaagctgcccaggaaaaaatcagcagcaggaatatcttgacgggcggcatcatggctttagacgggtttccatgtttccggagtaaaatttcaaatggaattcatggcgtgagcaggatctttctatacatcaggtaaaagtaaattcatagagataaaagagaacatggaatgcctctgtttcggcatcccttgtacaggcgccggggctgccgtcaatcccggcaggcagacggggatttccttgtctccgtatcgccgcgcgaaggtatttttcttccttctccttgattgggaagctctgcatcaatttaagtctgaacaactggttgtatgactggggaagactttccggaggacttgccgaaaggagacgggtgtggttggatatggttcatgaagtctgaatcgctgaccaagcgccgtgtgacgggtgtggatgatccgctgttcctggattctctggatatttaccggacaagctttccggtgcatgaacagcggcggatacaggatttcccgttggcgtttcaagaccccggtttttgttatgaagtatttttaaatggggaaggccgggtggttgcgatgctggtgacgtggcgtcgggaacaattcgtgtatctggagtattttgccgtggatgcctccctgcgcggccagggcgccgggcaaaggattctggaagaattgagggatgcgtttccgtacaaggttattttggaaattgatcctccggaggacgggatctcacgccggcggctggggttttatcagaggcacggctttgtccccaatccgcagtttgattatatccatcctccttatacggatgagggtgaacctttcccgcttctgctgatgacgcatggagatttgctggatgaggagacataccggagctttgtggatttccaccatcgccacgtagtggcgaggtgaatgaatggccggggaaaacccgcgccatgggggattttctcctcttgaagcaaattatccttggggaggccgatatgagcctgtaggacatcaggctcatgttgcggttttgcctgtttgtggaacgcccctgagtctgtattttccgaatcagaagagccgttccgcatttttgggagacggctttttgaaaaatgcagcgggttgggatacaccggaagactcagctccatgcccggtccacggcttccctctcttccggggcaagatatctggagagccgctcttccatgcgcagcctgtattcgggaatactccaggaatggagcggctggacggcggaattggtgaattgccaggagggaacgggaacgaccacgtccagcacttctccggctctggagggcatcccggccagtaccgccgcaatggtggaggaaagctccggatgttcatccagaatatccagcagccatccgcagcccaggtccgtgggaatggcctccgtttcggccagcaggtccgcgaggcgcccgggagggagatttttggaaatgaaagacagataaggggcaaaccgcatgtctcccaggctcatcagggcgtccagcgccggagccatggatgcctgtccggggcagggagaggcgcagatgacattcgccaatccggcaattccgggaaaccgctcctccggctggggcgcggccagcgtataaataaggaaagcggattgcctgcggatatccggcgcctcatccgccatggcaaaaggcagcagggccctccatccgtcccctttgcgctgccggataaaagctgccagttgcagagcgcatttgcggcgggcgtccggagcgcagcgggattggaacatgttgtaaatgatgacgccttcttcttctcttcccgtttcattgcaggtgaccagcccgtaggcgatcatggccagaggccattgatccgaaccgatctcccccctgcgggagggatccgtgacgagggcggcaagccgcttgatttccgacaaagagctggtttgatcctgaaaaaggcccatgcccgcatgatagccggaggcggaaacctgccaaggaaaaacagtggactgcttacaggactccggagttttccggtgaacgctgttgaggcatgttattgagtacgaccggcgttttatcctttatttattggcattccggctcgcggctggacaggaattccgtattttttgctgaagctttttcctgtgttcctccccgcttttcccctggtagaggtaggcggtgttggagttgtatccagccgttcggtcgatgaggtcgagaacctcgccgtctccgtatcccgccttcctgatgtatttgacgacttccccggcctggtcggggaagtacttcaccagcatggagatgaatcttttctccataattctgataacataagtgtcaagcatctgattccttgatgaaaatgtaaccaggttattccatttgtgagtccattcgtaatctttgatgtcatttccaatatccttggctgaagcgtccatttcagattgatgttttatgggagaaaagatttcatgatatagtgattcctcattcttgtgaaaatccttgatatgcattttttttatttttttaataatgcctgaaagaagggatatattaaaatgtatcaattttcttttactgatctttaatgttgttgacagttgatttatatccataagggaaattgctgtgctgatccttgctttgctgtaaatatcattatttttctcgtttttataaggccatggttgatcactggtgtaatccggagcttcatacatgggggccccgcctatcagataaaggctccaaatcatgtcgcaggcttcttcccgtgtcatcacgccgtcatgctgcagtttgttgattgcggtcagaaccgttttggcgtgctgataaaatgctttcagatcattttgttccagcaggcttttcaggagcggagcatgcccttctgtacttctccggatatggatggaatcgggcggcatgagttcatgatcgaatgaatgtccctccgcggaggaaaggctccatccgaggcagatgaagatgattatatggagaacgtggttcaccgtcttgtccgggttgtttttcctggttgggagggggcggatggcgcaatgaatgaacatccggcgtcactctccgctctgtttccgctgaagctttttcctgtgttcctctccgcttttcccctggtagaggtaggcggtgttggagttgtatccagccgttcggtcgatgaggtcgagaacttcgccgtctccgtatcccgccttcctgatgtatttgacgacttccccggcctggtcggggaagtacttcaccagcatgggcacaaatattttttccataaatccggaaacatagctatgatacatgctgtttcttgacgaaaatgtgaccagattgttccatcggtgagtccattcgtaatctttaatgtcagagccgatgacattcccgtccggattggcaggatgggaacgtattatttcatctttcagcgctgtctctttttttccgaaatcagggaggtgcagagatttcagccttttaatgatggcggcggcgtaagcggcatggagatgtttcagccgttgttcgtggatgcccaggttgcgcgacatctgtttcgtatccatgatggagagcgcggaaatgactcctgatttggcggcaatgtcgttgtcccgctcgtctttataaagccatggctgaacgctgtcgtaatccggagcttcatacatgggggccccgctgatcagataaaggctccagagcatgtcgcaggcctcttcccgcgtcatcgttccatggcgccgcatggcgttcaattctgacagaactgtgtttgagcatccatagaattgtttaaaatttcctgattttaaaaattcttttaatttttttgatttttctcccatttgcccgcgaatatggatggaatcaggagccgggagttggcgatcaaatccggtttcttcccccagggaagttgaacagccaagatgtatgacggcaatcgcgtaaataaaatatttcatcatttttttaggtttatttattttgactggttgataaataagtgcttattatttttttctgtggacctgctgacggaacagttgaatttggaaaccgtcgtcgtagctatttcgttgacgacgtcaatccagtcgtaaaaaaaatgctgttcaacagtctggatggtttttacatctttcccgtcgacattgatgttccagtcgcaaatccatttataagtttgcggcaagtcgtaaaatcttaattccgaaatgagttttttgcttccaatattgtcagatagcctgtttttgttgtcaaggcgtactggtgcaggattgggatcatgtggggctgccaggctgccttcagccggggcgggaacgcagcccttatcccgttcaataatatggacatttcgaaaattcacgcttgtagggaggaacgttaattccaggacagctgatgcccctgccatttcttgatcaccatcctttggcagatcaaaataaatgactcctcttttattaaaatccggatgatttctgtcatatgatttccgtaaatgttttgcgctgatcccttcgggaacaatggctgataacgtgattttcgcttctcttccttcttccgtgactgctttaacggtaatgtcgcctccttgggagagatcgtttctaataatcaatgtttgaatgacagagttacttttattttgaaaagaagccagattttctccttcttcaattgtccattcgatctgggatgggtctccaatgagctggggcttgtctgaaaccaatattagaaaaactgtttcacctatgcccaatttctttcttttttgatcgttctctttctctttttcaggtacggagcctttttcttcttcttgaatataaatttgggcagagtactctgctgcctgcgattcgatgcgcaatacctcatttgccagtaaaggcgctgtgaagcagaggcccagcagcatcatggcgagatggcgttttgccggcattcccggggataagacgtatttttggaagaatggggcggatgcccggatgatggcgttcgcgttcatgttaaaattctctgtgctggttaccggttctgccgcaggggcgagactttattgccgctgattttgttgatcaatatttccccttgatgctttaattttttgtcattccatatttccagcagacggcggtaggttgccacatagtatgtgcgggtctgttctcttttttccaatgccgtgatggcgccttccatcatgccggcggagtatcttttcattttaggcgtccatgaggcattgttccctttcctggcccagacggaaagatgcttcccgatgaatccctccctgtatttgattatcttgccgatttcagggcaatccgccacgagtttgttccagcacagcctcgtgaaaagttcctccgccgcgggagaacagtcagggtccaggaaacaggcgtacagttcatagggattgaccttgctttcccgtattttgagtatgtttaccgctgcatgatggaggaggttgtgttcatggggcatggcctgcgccagttctttaagcagggtgagtttttgccggtcattgattcctttggccttcatgctcaggtaacgactccatgccggataattaaatgggttcatcttgcaggcttctttcagcagcaattcccgttggacgggacgcggagagcagtcagataaaaccgtcatcaggaaggattcttccgccagaccgtgatgaatgaaggcattgtaagccgggatgagctggacggggccgttccagggtatctggctttttcccgttgaccagttccatccgctgatgttgttgccgattttccagtgtccgccggggtgtttccagataaaggcgcagtgtcccggctgtccgatggcccacgcggggacgcctttggctctcagaaagcctgccgctcctttggagacggctccgcacacgcctccgtattccgtataaagctttaatgtgaccggtttgtggtcgtaaaaagcggctccggcatgaacgctgactccctgaaggtttttcctgcgataggggatgaaccccatgaatttatttccagcctgttcgggagggatctgttttttctctatgaactgctgggcccaggacaggtcttccaggctctctctgccacggaaaacgatggcccattcccacggctgcatcgtgtccgcctggggatggcatgcggattggaagtaggattcccggtaaaaattgaatttggacaggcattcttcaggagggatgacatttgaggcaagccctgcccccagagccatgctggtttcaacggggcggagcgttttattgttcgcgttccagatgcggtaaaatatggatagggtttgtttgccggctgccccggatagggcaagcattctgaagacttccgggtgggtggagagccatttcctgaatgactcgtccttgagttcatgctgcgtgaacggttctccgttttccgcggtgctgaaaaattggtacaggtggcataacagggcgacttgcggggcgtgcgccatggcccggattttatccgtgtcaaggtttgcggttcccagtttcctgcacagaatatcccgggcttttccggagatgaacgaggaacgttcggctgaaagtagtgtctggatatccggttcctgcgctgacgcctggataacgggaaaggctgccagggggagcgctcctaaaaggaggattcggaagagatgattcatgggagatgggcggaattgtatccatacctaatataatccatcatatggcaaaaagatgatgaattgtcaacggaaatgtttttgttttctgggaaaatgattgaacgaagagtcaatggaaatagaaacccagtgaatgaaaaggcgccgcgaaaccatgtccgcccgttgaatggaggcgtcaagggcggatcaggttttccatattgctttggaccaggtcaaccaggttgttgacggtcatgcccagttcctgcgccgcgcgtcggtaaagttccggaagggtttccggatgcccgtccgattccagcgccagccgatggagcggtatggaggcaaggagtcccggacgttccatttcccgcagccctacggaaagaagccagtttcccgaaggaaattccgtgccgggatgcaatgtccccgtccagccgtgcaggacaatgttcaaacggggatattttttcagcatttccgccagcgtgccccatgcgcggcagcagtgcagggaagcggggcggtccagacgcacggccagttccagatgccgttccagcgcttccttctggagaggcagccccgggatgccgcgccggcatttgtccagccccgtttccccaacgcccgcatgggggattttttgcagaagggattccagcctgggcatttcctctttccattcagccgggttcaggaaccagggatgaatgccgaaaaagggggtaacatgttcatcccgttccgccagaagggccacctgtttccagtccgccggggaggtgccgcagatgaaccgcggcgccgtgccggaagcggctgtagaggaatgggtgtgggcgtccggcagattcatcgttgcttaatgggacagagatggcgcgtccgacggttcaataatatcaaaactctgctttgccaggcgcacggcggcggcgcccgtttccatttcatcatggatgacgttggcgatgcccgcgtgatgcagggaagccacttccgaacggaatttggcgcgggcaatcaccgtgatgtccgcattggcgcccttgatctgcatgtaggtggacagggccggggaagggtccgggaatgtaaaggcaatcagccgcgcggtacggacgcccgccaggtccatggtgatttggtgctggatgtctcccagaaaggccagatggccgccgttgagcagggatttgacggtgtccgcattcaggtcgataatgatgcaggggatgccgtactgggacaggctttcatgaagcctcctgcctacggggccgtagccgcaaatgatggcatggtccctgatgccttccatgcgtgtgatcagggtttccacgttgaggcgttcccgttttgttttcaacccgggaatgcgcaccagcagcggggtgagtttccgtgccgccttcatcagcagcggagtcatacccatggagacggcggcaatggcgtaaacgttggtggtcaccagcgccgggatgggggatatttcctgcatgaaagggatgagcaccagggaaaattcccccacattggtgagtgcggtggaggccatgatgcccatgcgcccgggaattttcaggaagcttgcggctgtaaggcaggctacgaatttgatcgcgaggacaaaggaggcgaaggtcgccacctggccgatgtgttcccatagtccatcaatgtcaatcaacagcccggcggaaacgaagaagatggtcaggaaaaggtccttgaaggggagcacttcgctaagaacccggtggctgtagtaggagctgctgacgaagaggccggcggtgaaagcgcccagggcgatgctcaggcccagcagactggcgagcatggcaattcccgagcagatggcgaacaccatcagggtgaagagttcccggcttttggtccgggcgacggccagcatgatgcgcggaagcaggtagcggccgatcagccaggcggctcccagaaagacaagcccccgcagtacggccatgccgatgttgagcgctgtttcccatgagtcgggcgtggcggtgaagatctgcggcatgattgccaccagcatgatggcggcgatgtcctggaacagggcaattcccaccgccatttttgccccggaggttccgctcaggccgaattcctggaaggatttcagcgccaccgccgtggaggatagtcccataatggccccgaccgtcagggagtggctcatgtccatgcctgtggcgtaatgaagccccaggccgaaagctgcggtacagatgaacatctgaatgcctccaccgaccagagcggttttccgcaggtgcttgagttcatcgacggaaaattcaagccccagcgtgaacatgagcaggataattcctacctcggaaagagcctggatgctgacgtcggaattggggatgtggtccagaatgccgcagttggccagaattaccccgcagatgaagtagcccgccagcagggactgccggaagtgggccagaatgagggcaatcgcgatgatgcccatgaagacgacagtaagcagaatgaagaatggaggcgcgtcattagggcctccggaggccagcagagagagaaccatggcggtcaggtcgggaagttagggaatggtaatgaggttgatttccggcgggcagttgaagcggcccggccctatatagcctatgccgcgggtgacgaatacctgcttgtcctcataaggatggaacccggagtgcatggtttccccttccgacgccaatagcggggtggaaaagaaaggcagtttgatttggcctccatgcgtatggccggagagcatcaggtcccagcggtaatttcccagcaattcccttcctttggggttgtggctcaggacgatggttggcatgggcgagttttcctccaattcgcgcgggctcatgcaccggtccgggaaaaagtcaccctctcgcaggtctcccagccccaccagtttgaattccacgtttcccagcctggggatggagacgaaggcggcggaattcctgagcagcgtgaagcccccttccttcaggacgcgttccacattgtccgcaagggccatgtcatggttgcccagacatgcgtaggccggggcgacggaggagaggcgtttcatctgggcgatgtagtcgcctgcatgagtgacccgcagaaaatccgtgtacagatctcccagaaacacgatcatgtccggtctggcctgttccgccattgttgccgctttttccagcaggggcagattggtgtggatatccgacaataccaggatacgaaggccggaaaggccgggtacacatccggcaggggccgtgttttcattaaattccagatgattggcttcccagtgcatataggaggccagcagggaccccagcagaatgacagccgcggccgcatacaggagcttgcggagctgggaacgctttttggagaaagggtgggtggtcatgatagggaggggttgagaatggccagttccggcagggtgaataatccgttgcggcgcaccagcttaccgtccaggtaaatatctccgcccccggccgctttcgtctggatgcataccatgtcccagtggatgcgggactggttgccgttgtccgccacgtggtaggcctgccccggcgtcaagtggaaagagccggaaattttttcgtcaaacaggatgttgcgcatggggcgtgtgatggccggattgacgccgaaggcgaattcccccagcctccgcgcgccggggtctgtgtcaagaatggcgttgagctcccctgttttatctcccgcttccgcatgcacgaccagtccgtttttcagcgtcaggcggatgttgtcaaaggggatgccctggaacaggctgggcgtattgaaggaaatgtggccgttggcgctgtcgatgacgggggcggtgaacacttctccgtcgggcagattgcattcccccgcgcacgggatggcaggcagccccttgatggaaaaggaaatgtccgttcccggtccggtaattttcacatattcagccttttccatcatggcggccagcttccgcatggcgggacgcagggcggcgtaatccatcaggcaggtatggaaatagaagtcttcaaattcttccgtgctcatggcagcttgctgggccatgcccccggacggccagcgcagcccgcaccagcgcgtatggcggatacgccgctgggagacgggattcagggctttcatggcggcggccatgttttcctgcggaacggaggacagttcaaaggcgtttcctccgccgcggatttcaatgtaggcgtccatgtcctccatttccgccaggcggtggcggccgatgataccatattgttcttctgtggctcctgagagcatttccctgttcaggcgggactggttcaggcgcagaaagggcatggctcccgccttcctcacctcccggatgagggctattcccatttcttccggaatatccgtcagttccagcagaaccctgtctccggggcgcagggaggtggaataccctgcaagctgggcggccagggcctgaaaacgggggtctctcatgtctttattaggcaaatacggcagcctttttgtcaagccggagacttgccacgggcaaaaaactgtggtttcatcccccggatgtccagattgcccaagttaggaatactcggttccggttccggttccaattgccagtccatttacgatgccatccagtccggttccctccgggcggaaatcgccgtggtgatgtctgacaatccggacgccttcattctggaacgcgcccgctcctggggcatcccggcggaggtgatcgattgcggagggtttaaaaccaaattcccggaggcgtcccaggcctccgttgccgcgcgcctgaaggaatacggcgtggattgcgtttgcctggccggattcatgcgactggtgaaacatccgctgctgaaggaatttccttcccgtatcctgaacatccatccttcccttcttcctgcttttccggggcttcatgcctgggagcaggccgtgaacgccgaagctgcggagagcggctgcaccgttcattatgtggatgacggaatggataccggccccatcctgggccaggcccgcgtgcccgtgctgccgggggatacgccggaaagccttcacgcccgcattcaggagcaggagcataccctttatcccgccatgatcgcccgcgttctggaaacgctggcatgacctgattctccttctggccggaaagcaatccggccttctgccgggagaggatgacaggatgacgaattctcttgtcttgtgctgtgaacggaatccgttaaaaaggagtcctctttttcaaagaaaggataaaaataccatgaagatgaacccttccatcgccctgtttgccgtttccgcccttttggcgggtgcggcgggcgcgcaagaaaaggctgccgaagttccggcggccgaccaacccaaacaagagaaagaaattactgtgtctcccgaacagatgaaaaaggacctgggctattttctgggtttccagagcggccagcagctcggttccattcccaccctgacctttgacgacctggatcaggaatccttcctgcagggcatcaaggacggtatggtccgcaagcccgccaaggaccaggaacagctgaagccctccctggatgcgttccagaagcagatagatgaacgcatttccgccaaggccaaggccaatttggaggccagcaagaagttcatggaggaaaacggcaaaaaggaaggcgtcactacaacgaagtccggcctccagtacaagattgtgaacaagggcggcgaagaaaaatttgatgaaaagaagttcaagaaccccatgttcaaggtgaagtacaagggcacgctgctggacggcaccgtgtttgacgacaccaaaggcaaatccgtggaacttccccttcaggtcatccccggctttgccgaagcgctgacgacgatgcccgtcggctccaaatggattgtttacattccttccgagctggcttacggggaaaacactcccggcgctccgattgaacccaattcaccgctcatctttgatctggaactggacggcatttcggaagctcctgccccccagggcggccccatgagcatttctcctgaacagcttcaggagatgcttaaacaaagcggcgcccagcagcagtaaggaaaaaatagttcaagccagggccgttcccgggagggaacggcctttttgtttttgtctgtacctctttcatcaggaacgcgaatgggcagacggggaatttataatccgttggcaagccaattttcgaaaaaagctcacattaaacaaataatgggaaacaaatatcatccgcctgtccaacatatctacctccatatccagaagaacaaaatcatcattctttcattacaagcaatatacatggattaaggaaagaagcaggattataaatccgggtattactggccacaatatctttgatcaatatgagacttcatcttcctccgtctttgcgttccgcccttctcgcttccctggtttccttctccggcatttactcttattcccatgccgcaacctcggcggatttctggcagattcccgattttggcggtcctgattttacatggacgggggatggggaaggcgacgccgtaggaacggcagacaattgggagggagatgcagctccctcccgcgtggacaataaggggccgcacttgatttttaacggcgttgaggtgacggtgacggggaaccctcccaatacctcggacggcggcggtatttccgtaacggggaacggcagtgtatccgcggggctgggacaatggggcggcaatgtttacgtggagaagggttctacccttaccacctccttcagcaaccagatcaagaatacggaagcggaaggccatgccaatatttatgtggacggcgctctgaacatgacgactccgggggggaacctcaattttgaccatggctccggtgccggcaatcattactggcacatcgggcttgacggaatggtcaacctgtcaaacaccaccaccattaccaagaactccaaaacctggaatgtggaggtagtggttgcaagcgctatggaagagctttcagtcaccaatcgcgagatggttgacgatgccctgataacacgctatttcatgtctacaggggccgatttaggggcatccctggattccctgcgtattcagaagcaaaccggggatgactcttatgaggcattgacgagagccgattccgccggtcagctgggagcggacaatttcctgcttgtttccaacggttccggcatgtccgtgcagtacaagggggaagggtataatgcagagacgctggtctggaattccaacggcacatggagcaatacgggaacgggctggtacaagcagggtgacggaaacaaaacggatacttccttcctgaatgaggatgccgttattttcacggcggcggaaggttccaaaacagtcaatttttccggaggaatcaatgtttcctccatgacgtttgaggcggattatacgctccttcccggagaaggagcctctctttccgcccgggaaacggttttaagcaacggctcgtccctgacgttgggtgatggggatcaccgtttttccggatttgaaagtctggtgacgggtggggaaaattcttccctcacggtttatatgaaaacggatgcttcttctgcgggaagcgtcaatttgctggagggctcggctcttcagaatctttacgttgatggtgccttgaggctgagagcttctgcccagtcagggacatggatgcttggcggagccagcctgcatatgatggcggggtctaccatggtgttcaattccgatgcggggacatccattggagcggggcaaacagtaatcgcggagggcagcctgaatgtctatgcgcagaatgtttccgacagcaacacgtatctttggaacctgaagggcggcgagagtgtctcgaatggagatacgctgacctttaacggatccagcaatccgaccgtggccggcaatatctcgtacgccggcaatatcgtaaccagctcccagaccggctcttccatgacgtttacgggagacatccaggcggaatcgttcaaggtcgcccattattacggcaggattcatatggctggtaatgaattggcggtcaacaagctgtgggttggggccggcggcggatacgacaattccctttatggggcccttgatcttgattccggcaatgtgactacggcaggccaggtccggcttgccgagctggggcatggagtgcttaatgtgaaccagggttcctcactgactgtctccggcagcaatgatacccatagcacaagcgccagcttcctgctggctcactgggcttattcaggggaacttaatttgaggggcggttccctgactgcattgtcaacttcgatgcgcctgtcctgggatggcacgggcacgttcaatgcctcttccggaacggcggatttgctgggaatgagtttctgggcttccggaaacggttcattccggggcagtttcctgttgggtggcgcgacatccggggatgccagggtgaacataggctcttcgggcatcaccgatgtggcgggggcagccgttatcaaactgggggaaggcactctgggagccctgtccaactggagtataggctataatccgaatttcacgccttcttatgtagaacttctgggcacggtgaacgggactatcctcgatacgctggatgccaatgaccatgtcacggggcgtactgttaccttctccaacgggctgacgggaaacggcagtctggtgaaggttggcgatggggttctggttcttaacggaacggcccaggccccggttcctgccgaaggagaaacggcagccgttcccggctttaccggaacggtggaattgagggaaggcggtttgacggtgaaggattccagcgttatcgggcagggttccttgctgatcggaggcggccttaccgtgaacgttacgtccgcggacgggtatgtgctgaatgccggggctacgctgggatccacgggaattgccggaggaacagctactttatccgccgggttgacgttgaacggaggcgctttgagcttcagttctcttgattcggaaacggcggctctgaccgtcaattccatcagcggcagtgaggctacggaagtacggctgggggtgtcttctctggaaacggggattagttacgcattgctttccggagcggggttgacggaaagttctttctttactttgggcggagccgttgcggagctgtacaatggaacgttttccgtcagcaacggcactctttacgtcaatttgagcgacaaggaaggtttgttgagatggaagagcggcacctggaatacggaaagctcgaatacctcctggagccttgacggaactccgtcagcttatgccgatggggaaacggtatatttctccaatggcgatggagtggataaaaatgtgacgattgcggggaatgtcgctccaggcagaatcaacgtttccggtacggatttcatttttacgggtgacggctccattaccggagatacgacgctgaacctgctggacggagcttccctgaccatgaacaacgccaattcctataccggggataccgttcttggcgatggcagtaaactcgttgtcggcaatgccggcgcgctgggctccagcacggtcctgttgcagggggattccgttctggaactgaccacgggcacgtggaacggactgggaacacgtttgaactccaattcctctggcacgctgaaattgagcgagaacgcctccggaacgacaacggccgccctgactggagtcagatatgagctgggagccaataccacgctgactctttccgccggaacctatggaaatacgattaccggggccggcacgctgatctccgcagtaggaacgaatgtccttaatggaaatgttgatattacaggagaatacagggtgttggcaaccaacggcacggcatgcgcctggacgctgggttccggcgcttccgtgacggcggggagctttatcggccgctacgagtacaatggaacgactacgctcaatatcagcggggatgccgtgatgaatattaccggcaccttgaggattgcccgtgacgggagaggcgtcatgaatattggttcaggcggcatggtgctggcccggacactggatttgggacagaactgggacggagtaagcgccaagggcgccaccattaatctgaatggcggttccctgctcctcggttcaggcggtatgacggcgtccggaaataccaatacgattgccctgaacatgaattccgggacgctgggcacgacggcggcggaaggctggtcttccgcctataacatgacccttactggaaatgtgacggttgatacccgccagtatgatgcggacaccaagtcttaccatgaccaggcttccaccggcatcaccctcggaggcgttctttccggagcgggcggcctgacgaaaaccggctccggaaccttgaccctttccgggcagaatacttatacgggactgactaatgtccaggcaggaacgctggcgtttacaaatacgaacgccatgaccctgggcagcatttccatgggtgcgggggccaggatgacgacggcttccgccctgacgctgaatagcggcgcggccctcacctttgacatgacgggcgtggcggcgaatgagcctgtcatcaatatcacggccgggaccctggctcttgcggattcatcctgtgcgctgacgattaacaattatggagaattggaggcgtctaattatgtcctggcccagtgggctgcggccggaagcctgacgacggattccttcacatggacgcccgacatcaccagggaaggattcgaatattccgtggtggtggaaaacaaccagcttgtgctgaaggttgcagacgtcagcggagacaacggttttgtatgggacggaggaacggaccggaagtggatcaacaccagcgttgacggctggacgacgaggcaggcgggagtggatacgctggataatcaggaaatttacttctcttcctcggaagcgggtgaagtcaaggtttccggtactgtaactcccaagagcgtcgttttcaacagcggctcttacacgctggtcagcgatcctgacaacgcgggttctatcgcggattccacagctcccaccacgcttaccgtgaacggtacggccgaggttgccttaaacctggccaacacctataccggaggaacgatactcaatggcggcattcttaccattggaactgacggagcgctgggaacggaaggggatattacattcaacggagggacgctggcctatgcggattccgccgccggtgcggatgcgacaggtgatgacatttccagttgtgtcaacgtgggagacggaggttccctgaacgtttccgtgcttggcgcgggggataccgtttcctgggccggactgacagccgacgtcatgggggcaggcactaccctgaccaaaacgggagcgggcactctggcccttggatatgcaggaaataccctggcccaccttactgtggaagagggcacgctcgctttcacgggcggcgcgaccatcggcgtaaatccgaacaatgctactattgtccgcgtcagtgaaggcgcttcccttgctctttccggcggaaccgtcaacctgcatgcccagctcaatggggcgggcaccgtcactatcgggactgcggatactgcgggactggtcaatatctccaatacgggcaataccaacttcactggccgcctggaactggtcggcaacggggtgaatatgaataccaatgccaactgggtagcctttggggcaggaaatacgctgggaggcggcaccgttttcattgatggcaagggcttccatttttccgcgggcgcgacggcagccaattttgaaatcggcgcaacccacggcgcgatgcagaacggctcttccggcgccacatatactttctccggaagcctttccggttcgggcacgtgggccatggctgcgaacgtgcggatgaacaatgtcctcacgggatccctcaaggacttctcgggaactctggtcaccaatgagacttccgtccacaacaatcgccaggcctggaacttcggttccggcggggcttgcgccacaggagaggggaatgccgtttttggagacggcgccattctgggaggcaacacgggctccgcgaataccgggctggccgcacaatacaacgtcaattacaacaatacggaactggtgctgaacgcgctggttcagggcaattccagcctgacgcacgcaggcgcgggcactctgatcctggatcaggccaataccgctgcgggagcgctcggcattacgaatgcgggagccgttgttcagcttggtacggaggacaaggccggccagtgggccggaaccgtgctgaatggagcgggaacactgaaaatcgtcaatggcgcgttgacttccgccatgacccgggcggaaggcgcgacggcagccattgtcgtggactcagcagcttctgtcaatttgggggggactgacggcagcatgctcaagggcattacgctggctgccggaggcaggcttgccaacgtttccggagatattacggtgggggcgggagccacggaaacattgaatcttaccctgggggcggataacgtcaaccaggatacggccggtacggccatcattgaccagggagacggcaggcttgtcatcaacaatcccgccacagtcaatctggacattgacgctattgtgaacacgctcgtcgcccataaggaagccggtgcggaaagctggctcaccctgacgaccggaacgctggaatgcgaaaatcttggcgatatccagttcagcaggattctttccaattacggcatccgggtgacgggcaccaacggcggaagcctggttctcagcgggcaggtcagcgggctttatatggtgaatgattcctccgcttccgaccctgacaccgtcaccagctacggtacgctggggatgtactccggcgtggtgatttcccaggacaagacgcttgccgttcagttgtccggagctcccggcgattccgacggggacggcgcggtcatcaacaaccttctgggcgctacgggaagcacgctgaaagtggaaaacaccagtgcggacggaggcaacgccgttgtcatcctcaacaacgaacgtctggaaacgggcttgcctgctcctgatgattacgccggtgcggattccatcatgggcggaaacatcgtcggggaaaacggagtcaccttcatcaagcaaaacacgggcaagctgacagtcaacggttcttttgtgacggacaccctgcgcgtggaaggcggttcgctcgctcttaacggtgaaggaagcaactttaatcatgtggaacttgccggcgcagcggaaggcgttgttctggacatcaaccggaataccgtcatgggtgacctgacggacagcggcgaaggcgcggccctgaacatcggcagcggagcctccctttccgtcaacggcgccagcagcctttcctccagcaccatccagggcagcggaacgcttaccctccatgatgcgctggaactttccggaacggcttccctccagggcggcattctgctcgatctggcgaaagatggtggctcccagggaatactggaccttggttcgacatccggcagcaccgtttccggaatcggcggagagggcactctgaagagcgctggcggcgttttggctgtcaataccggtaattcgggcagcggctccgttttcagcggtacgctggaaggatgcgggcagcttaatatttccggcaatgccgggcagacgtttgaaaatgtcatgaccgctgccggcagcagctgggcagttaataacacggggctcctcaatatccggatgggaggcacgatggacgacccgaaagccaatacggcgctgaccctcagcagtttgacgctgggtgacggttccagtacgaatcttgccttcaacacggactacgccggccccatcatcagcgtgaccggaaacatcagcatcagccagggcgcggaaataactctcagttccactggcgggaacgagctgactctggacgcagacggcagttacacgctcatgcacgcggacggagccattgatctgggaggaagcgacagactggctatcctgctggatccctcctcctccgcgttcaagaaatttgaaaatgatgcgtacctggtgatggaaaacggcaacctcgttctgatggccacggcttccagggacaataaatacgcccgccttgcggatacgtttaattccggggccggggcggaactgctctggaacctgcccggcgatctcgctgcggattccatcctcaagaaggtggatgacgccgtaggtgccctgacgtcttccaacccctcggaagcgaagcgcgccatggcggcggcggctgggagcacggtcaacgcgcttgggacggcgcaaagggacgccctgcgcggccagatgggctggatcaggaaccggaccaccctcatgggcgtcaacccggcctacgtcaacgacgacctcccccgcttccacatgtggatggaaggcacgggctcctacgccaaactcgacacccgcggggatgaaagcggctaccagctcaccacctggggaggcacggtaggcatggacgcggacctcagcgaccgcctcacggtgggagcggccttcacggccggctacggcgacctgacggccggcgcggcggacagcgccgacgggcacctggacagctactacgccagcctcttcgggcgctaccagaacaaacgctgggcgcacacgctcatcctgacgggagggtggaacgacgcgaaactcaaccgtacggtcaactatggggaaggaagctacgggacgcagggaagcaccagcgggtggggtcttggagcgatgtacgaactcacctacgacatctacctcaacgaaaaccgcagcagcgtgctgcagccgctgttcaacgcctcggtggtgacgacgcggatggacagctatgaggaaacgggtgcgggcaacgcgggcctgaacgtcggccggcaggactggacgacggggacgctggcgctgggcggccggtggatgggcctggtgggcagcaacatcttcggacgagaagcgctggcggaaatccgcgtgaacgcggcgcaggacctgggagaccggaggggggaaacgaacgtatctctgctgggcaaccccggctttgcgcaaagcgtgaggggggcgaaagtgggaacgacggcgctgcagctgggagccggactgagcgtgcctgtaggaacgaagggaaccatctacgtgaacgggaacgcggacatccgtgacgggtccagcgcgctgaacggaagcgtcggctaccgctacgacttctaacaagaaagaaaacacaaggagggggggccacccccgaaaggccttcctcctgaccctccagagccgttccggaacaactccggaacggctctgttgctcaaagaaaacccgccagtgccccaagaggggcaaaaatgaggtaaaaacgcgccaaatgttcccggccccctcttccgctatccggagccggaaaaaaccggaacgcgagtaacagggccttttttatgcgatttcagcggagttttgaacggacaggtcttacgcgcgcgcacgcgttttataatattagccttgcaaaaaattaagataagcgtagtatatttcggttatgtccgaagataccaacgaggttgttgaaaccaccgtttccacgacggcgcagcatgaatacggcgccgcgcagattgacaaactggaaggcctggaggccgtgcggaagcggcccggcatgtacatcggggaccctgacgaacggggcttgcaccattgtgtatttgaagtgctggataactccattgacgagcatctggccggctattgcagcaagattgacattgtcattcatgtggacggttccatttccatcgtagacaacggacgcggcattccggtggatatccacccgaagttcggcattcccgccgtggaactggttctgaccaacctgcacgcgggcggcaaattcggccagggcgcgtacaagtactccggcggcctgcacggtgtgggcgccaaatgcgtgaacgccctgtccgactggttcaaggcggaggtgcgccgggacggcaagcgttaccagatcaagtttgagcgaggcaagacggtggaacccctccgtaccgtaggttcctgtgcctgtgaagtcacgggaaccacgatcacgtttttcccggacgccaccattttcacggataccacggagttcaagtttgaccgcctgacgacgcgcctgcgggaactggctttcctgaatcccggcctggtcattgaactgattgacgagcgtgaagctccggcgcgccgggaaacgttcttctataaggacggcattgtggagttcgtccgccagctgggcacgaacaaggaagtgatcaacgaagaccccatttccatttccggcgtccggaaggtggaagtggagtacgacggcaagaagatggaggacgatgttctggtggacgtagtgttccagtacaacaacacgtatgaaacgaacatcctttgctttgccaactccatttacaacggggacgggggaacacacctttccggtttccgcggcgccctgacgcgcgtcatcaacggttacgcgaaggccaacggcctgctgaaggaaaaagatccctccctgagcggcgaagacgttcgtgaaggcctggtggcggtcatttccgtcaagatgcccaacccgcgtttctcctcccagacgaaggacaagctggtgaatacggagattgaaggcgtggtgggcaacgtcgtgtacgaggaaatcaagacgtactttgaagaaaacccggcgatggccaagaagatcatcgagaagagcatcacggccgcccgtgcccgggaagccgcccgcaaggcgcgcgaaacagtccgcaagagcgccctctccatcggcggcctgcccggcaaactggcagactgttccgaccgggatcccgcgaagtgcgagctgttcattgtggaaggtgactccgcaggcggttccgccaagatggggcgcgaccgccgcacgcaggctatcctgcccctgcgcgggaaagtgctgaacgtggaaaaggcccgcctggacaaagccctgggaagcaaggaaatccagaacatgattacggccatcggcgccggaatcggggaaggggacgatgaagcctccttcaaactggaccgtgtgcgttaccacaaaatcatcatcatgactgatgccgacgtggacggcgcccacatccgcaccctccttctcactttcttctgccgccacatgccgcagctggtgcgcgccgggtatctttacatcgcccaggcgcccctgtaccgcatcatccgcaggaaaaaggaagagtacgtgcaggatgacgtggccctgaaccgcaaactgattgaactggccgttaatgacgtgaccctgcgtttcgcggacggttcccgttccttctctcccgaagaactctccgccattctggaaacgctggtcaacctccagcgctatacggaatccatgcaggcgcagggcggttccctggaagacctgctcagccaccgggaggccaacggggaattcccggaattcctggtgaaggtgcgctgcggcaatgaagaggaaatactcttcttccatgacatggaggccctgaccgccttttccgacgaaaacagggaccttttcatcttcggcatgccctcggaagaggagctgatggaaaatccgcttccggaacgggaggggcccagccgccgctccatcacccatgaactgcatgaagccaaagccatcacgcgggctctggcacggctggcggaactgggcattccggggaatatgattgtctccatggacacgcccctgtttgaactggtggagggcgagggggacaaggaaaaagtgacccccctgttttccgtcatggacattctggaatccgtcatctccatcggcaagcgcggggtggaaattacgcgattcaaagggttgggtgaaatggacgccaaggacctgttcaagacgacgatggacccggaacggcgcgagctgctccgcgtcatcctgaacgatgacaacgccgtcagggccgatgaaatgttcaccatcctgatgggggatgtggtggagccccgcaagaattacatcgtggaccatgccctcaatgtccgcaaccttgacatctaacccccgcactctctttcagcaccatggaaaataatagaatcaaaccggtggatgtagccaacgagctctccacttctttcctggactactccatgtccgtcatcatctcccgcgccctgccggacgtgagagacggcctcaagccttcccagcggcgcatcctgtacgccatgaaggaactcaatctgtcccccgggggcaagacccgcaaatgctccaaaatcgtgggcgacacgatgggtaattaccacccccacggggatgccgccatttacggcactctggtgaacatggcgcaggactggtccatgcgggatattctcgtgatcggccagggcaacttcggcacgccggacggagacccccccgccgccgcccgatacacggaagccaagctttccggcatgggcgtggccttgatggcggatctggacaaggataccgtggactttgttcccacatacgacaatgaacacacggaacctaccgtgttcccctccgctttcccgaacctgctggtgaacggcggcacggggattgccgtggggatggccaccaacatgcctccgcacaacctgggggaagtggtggacggcatttgcgccgtaattgacaatccccacatgacggtggatgagctgcgccagtacatcaaggggccggattttcccaccggaggcgacgtgctgggcttttcaggcattgacagctacttccgcaccgggcgtggctccgtgcgcatccgcggcaagatagacatggaagtaacggattccggcaaggaccttctcatcatccgggaagtgccgttcggcgtgaaccgcgccgccctccaggaacgcatcgcggaactgtacaaggataaaattctgacggacatttccggcatccgggacctttctgacgagaaaacctgcattgaaatcgagctgaagcgggatgcacgcccgcaggtggtcatgaaccagctttacaagctcacctccatggaaacttcctttgcggtgaacatgctggcgattcatgacaaccgccccaagacgctcgccatgatggacgccatcaacttctacatcgagcaccgccgcgaggtggtcgtgcgccgcacgcgctacctgctgggggacgcggagaaggatgccgagcgcctggaagctttcctgctggccctgcaccacatggatgacttcatttccattatccgggattccaaaaaccgggatgaagcccgtgaacgcctgcagaactacaccttctccacgcagacggcggaaagcctgggcatcctgatccgttcccaggcctctatccagggggaccgctatgtcttcacggaacgccaggtgaactccatcctggacctgcgcctgtaccagctgaccgctttggaaaacgacaagatttccggggaatacgcggaactgctggtccgcatcaaggactacctggatattctggcgaacgaatcccgcgtgctgggcatcgtgaaggacgaactgaaggcgattaaggacaagtacgccacgccgcgcgtcacgcgcatcattcccttctccggggatatggccattgaggatcttatcccgaatgacacgatgatcgtcaccatcacgcacagcggctacatcaagcgcaccaactccgcggaataccgcgtgcaggcgcgcggaggcaagggcgtgaaggcagccactaccaggggggccaaaaaggacgcggaggcggactttatcgaacacctgttcgccgcccagaaccacgactacctgatgttctttacgaacaccgggcgcgtgtacgtggaccgcgtgtatgagattgacgaggcggcgcgcagcgcgcagggccgcaatatcaagaacctgctggatctccagccggaagaagccatcgcggccatcctgcgcctggaacgccgggtggatgaaaaaggcaatgacattacctttgcggaaggcagcggcaatgttgttttcgccacgaaggacggcacggtgaagaaaaccagcctgaacgatttcgccaactaccgcaaggccggcatcatcgccattaatctggaggaaggcaacagtctggtgaacgcggaacttaccagcggggccgatgaaatcgtgctcgtcacgcatgacggcatgagcatccgcttcccggaagaagatttgcgtacgcagggccgcaacaccatcggcgtccgcggcatccgcccgcgggcgggggactatgtggtggccctggctattgtggacccgcagaaaaccctgctggtggcttctgaaaacggcctcggcaagcgcacttcctttgacgaataccgcacgcagggccgcggcggcaccggcatcaagaccatgaactgcacggacaagaccggcaaggtggtttccgccacggtcgtgtccgacgaagacgagctgatgctgatgaccacggccggacaatccgtccgcatcaaggtggcgaccgtgcgtgaaacgggccgcgccacccagggcgtgaagctcatgacgctgaatgagggcgaatccatccaggacatttccatcgtcattcccgatgatgaggatgaagaagccccggcggaaacggaagacgcgggagccggggaagtgtccggtgaaatggaaactccggcggaagaataatattcaggttttcctgctccggcgtcatgccggagcagggggcttcatgggccgtttttatggaagaccccctttcattggagcaatgtgccggacgtctggaacggcgcggattccggagctttgtagtgccgggcctgaaggaggctgcggaggtgatgctcggcctggtgcgggagttcagtccgtcgtccgcttcctatggggattccatgaccttgaaggctgcgggcattcttgatgacctgcgctccaatccggacattcagttctatgacggctttgttccgggcatggagcgggaggaaaaatgggagatccgccgccggggcatgacggcggacctgtttttaaccggcgttaatgccgtcagcatggaagggaccctgcactgggtggacatggtgggcaaccgtgtggctccggtggcattcggaccccggcatgtcattctgctggccggttccaacaagctggtggccacgccggcagaggcccgggaacgcatccgccgcattgcgcccctgaacgccaggcggcatgaagggttcaggactccctgcatgcacaccggaatctgcgcggattgcaattccccggaccgcctgtgcaacatccacatgtcccttgttaaatgctttcccaaaggaagaatttccgtcattttgacggaagaacccggaggactttgactcatgccttttcaaaaccggatagaaatcatggccccggcggggtcgtttgaatccctggcggccgccttgcagggcggagcggactccgtgtacttcggagtaggaaagctgaacatgcgttcccgcgccacggtcaatttttcggaagaagatttgccggaaatcgtcgcgcgctgccatgaggcgggcgccaaagcctatctgacgctgaatatcatcgtgtacgatgaagagctggaagaggtgcatgccctgtgctccgctgcccggaaggctggtgtggatgccgtcatcgcttccgacctggcggtgatttcttatgcgcgttccattgggctggaagtccatatgtccgtgcaggccaacgtctgcaacatggcctccgtcaaattttacgcgcagtacgcggatgtggtggtgctggcccgggaactcaccttggcgcaaatcaggcatatcattgaatccatccggaaggagggcgtgaaaggcccctccggtgagctgctgcgggtggaaattttcgcccacggggcgttatgcgtggccgtgtccggcaaatgccacatgagcctggcggcctacaactcctccgccaaccggggggcctgtttccagaactgccgccgcgcctaccgcgtgacggacgaggaaacgggcaatgagctggtgatagacaataaatacgtgatgtctcccaaggacctgtgcaccattccggtgctggaccagcttctggacgcgggcgtctccgtactgaagctggaagggcgcggccgttcctcggattacgtcaggacggtcacctccgtgtaccgggaagccgcgcgggcgtgccaggacggaaccttttcctcggacagggcggaagcgtggatgaaacggctggaatccgttttcaaccggggattctggcagggcgggtattacctgggcgtgaagtggggggaatggagcggttccgccaacagccgcgcagccctgttgaagatccacattgccagagtagaaaacttttataagaagaacggggtggctgccctgttcctggaagccggcggcttgtccgtggggcaaaccatccttatagcaggccccactacgggagccgtccgcatggaagtggccgccatgcgaagggagtcggcagagggaatggaatccgtagaagccgctcaaaagggagaaaccgtctatctggcggttcccgaacaggtgcgccgccgggacaaggtatatctgctgcgcccccggatgctggaggatgcctgaatgcccggctgacccttttctcttctgcctgccttttccaaaaaccgggaattgacgggcagaatgattttaatttttccgtttcctgcccggctgggccggctgggcgttcggtttcagccggggcctcttgaaattcacggcggatttccggtttggaagtccggcttaattaagctatccgttcattatctttcgtttgggataaaaatgttggaaagtgattttccaattgaatgaaaaagaatttctctggcgtattatttgaaaaccatacgccatgcctgcctatatttcctttctgcgccttttttcatgttcctgcgccttgctgggcgcaggaatgcttcacgcttccggtttacagccctggctgcgggagctgtccgtaattccgccagcgccttccgcggagggaagggattcatggatgcggcagctatggacgcggacggcggagtatgctgcttccctttccgagcctgctgccgctgacgattgcggggatgcgatggttttgctggttcccgtatttcaggcatggccggacgggaaggcagccggcgccgcgctggcggaaattctttccgttccggcagagagtattggagccgtttcttcctgggatgacctggttaagcatcaggaagccattcaggaacgagtccgtttcctcaggctgaagaagctggcggcctattacgattctgcggccatccgccgtgcggtgaagcgaaaccgggacaagtacggggaacggtacgccggtgcggaaggcttcctggcacggctggatgagtgggaaaaggagctggggcctctggaccggtgggtggagcaggccgggccgggacaggcggccctgctgcgggagatggtggatctgcggagaaaagccctgattgaagccctgccggaacagaacggcctgaaggcatgggtaagcgtgcggcggttcaatccgtccgggaaaagttctttcaatcatgaccgtccggcgaactggcagggtatttccagcatgccggggcccgggcgcagataccgcagcggcattgtgaaatttaacggggtttcctcttcttcccctgtggagcagttgctggcggacgaccgctgggtcgggcatctggatgttgatttttccggggagaagctcatgttcaccgggaatggattcggcaagaaggaaaacaggccatgggacgtgtttgagctggacttgaaaaccgggaaaaaggaatcccttaccgcgcatatgccggcggatacggacagctataattcctgctacctgccggacggccggattattttcgtcaatacttccggcatgcagggtgtgccctgcgtggccggggtggattacgtgggcaacctccacctttacgaccgggaaaagaaaacgacccgccggcttacctttgaccaggacaataactggttccccaccatgctgccggacggcagggtgatgttcctgcgctgggagtacacggaaagcgcccactatttcagccgtgtgctgatgcacatgaatccggacggcagcgaccagaaggaatactatggttccaactcctactggcccaacagcttgttcaacgcacggcccctccccggaaggccgggcatgtttgcgggcattgtcagcgggcaccatggagtcaagagactgggggaactggtcctctttgacgtgaacagggggcgcaccgccacggagggtgccgttcagaagattccggggtatggaaagcccgtggaaaacgtgaccaaagatcagctggtgcagggattgaagactccttatttcgcagaaccttatcctttgagtgacgagtgtttcctggccgtttcttccccctccggcaaccagggcgtgaccaatgtggtctggtgcgacgtatacgataacattgtccctctcacggcctcatcctatttcgtttatgcagaccccgcgcccctggggccacgccaaaaaccgcctgttctgcatgaccgggtgaagacggaaagcaagacggcaactgtttatatttccgacgtgtaccggggccgcgccatggccggagtgcccaggggggaagccaaggccctgcgcgtgttcatgtccgagtacagcccccgcaatacgggaagccactatgccatgggcatggaaagcaattgggatttgaaagtgctgtacggcaccgtgcccgtgaatcctgacggatccgtcatcttcacggccccctcctgccagcctctgacgctccaggtgctggacggggaggggcgcgcgctggcgctgatgcggagctggtttaccgccatgccgggggaaacgctcagctgcataggctgccatgaacggcagaactgcgcgccgcccgccagggcggtcatggcatcccgccagaaacccgcccctatcgtcccgtggtacggcccggcgcgcactttctccttcatgaatgaagtgcagcccgtgctggaccgccattgcatacgctgccacacagcggaaagcaaggcccgtgaaggagtgccggatttcatgacattggaggccgtcaagggggctcccgcccccggttccgtctcttattggaacctgcacccctatgtgcgccgcaacggcccggagggaaactatctggggctggcccccacggagtttttcgcggatacgtcggagctttaccagctccttaaaaaaggccaccatggcgtggaaatgccgcaggaggactggaaccgcctggttacgtggatggacatgaacgccccttatctgggcgaatggccgggagagcgcaatgaagggctgctgaaacgccgttatgacctgcacggcagattttcaggagcggaacgtaactacgtgacgatgaaggattccctgttccggagaagcgccggcggttccatccctgacgccgggaagcccattgccggcgccggaggaaagagcgttcccgttccggaagcgcgtaatgaaacgctgactgtggatttggggaacggcgtgaacatgacattccgccgtattcccgcagggaagttcaggatgggaaatgaacgggaaacaccggcggaacgtcctgtttccacggtggggattaaaaggccgttctggatgggtgaggcggaagtgacgctggagcaataccgccgctttgacccggagtatgctaacggatggtatgacatgcattacaaggaccaggtgaggcccggatacgacatggatgccgatccgcgttttcccgtcatccgggtgccttgggccagggccatggaattttgccgctggctttccgggaaaaccggaaaaaaagtgaccttgcctacggaagcgcagtgggaatacgcggccagggggggagctgatacggatttcttcttcggggagcgggatgcggatttttccgcgtatgccaacctgggggacgtgacgctgaaggaactggccgtttccggcgtggatcccaggccgattaaaaatcccaaccgtttctgggacttcgtgccgagggatgaaacatacaatgacggaaaactccatctggcccccgtcaagagttacaggccgaatgcctacggattgtacgacatgatcggcaatgccgcggaatggacccgttccgaatacaggccctatccctggaaggaaggggacgggcgcaatgaaggcctggactcccgtgttccccgtgcggtgcgcggcggttcctggtatgaccgtcccagacgggccacctcctcctggcgctggggatatcccggctggcgtccggtgtataacgtggggttccgggtaatcatagaagactgattgttgaaattgccatgaaactgacaaaaatgctccgcgtctctgcgactgcccttggctgcctgctggccctcatttcatgcaggcaggagccggatgctgcttccggccctctggctccggtggatgtgaaggtcgtcaatcacctggttgccgtgctggggcatgagagatgcgtgctggaactggtggaccctgcttccggggaaaaggtgaaaagcatccggctggcccagcctcccaacggcatggccgtggatggagcaacggcctatgtggcggaaggcggcccgcgcggagcagtagaagtagtggacctggaaagcggggaattgaaatgttcctttccggccgggcatacgcccatgtctcccgtggtgcgggaggaaaagctgtatgtagcctgccggtttgactcccgcgtgctggaaatggacgccgctaccggaaccgtgctgaattcctggaatgtcccccgtgaacccgtggctctggccgtttctccggacggcaggaaaatctgggctgccggccatttgccggccggggctgcggacggggatttcacggctgccgcgctgactctggtggaagatggaaaagcggtccatttcccgctttccaacgggacgcagggagtgcgcggaatggcgataagcccggatggccgctatctggccgtggcgcatgtattgagccggtaccaggtgcccaccacgcagctggaccgcggctggatgaatacgaatgccgtgacggttatcgatacggacgagccggacaagcctcatcccgttctgctggatgacccggatgcgggggcggccaatccgtggggcgtttctttttccgaagatggcggaaaactgttcgtgacgcatgcggggacgcatgaactctccgtaattgatttcccggccctgctggagcgcatgaagcgggaaggccggagcaatgagccggtttccgaaaggcttggtttcctgcacggtctccgcacccggatcgctctgcccttgaacggcccgcgctccgtggcctccgatgggaaaaacgtttatgtggccggatacttttctgattctctggcagaaatctccctgaaggatgcctgcaaatccagggcaattcccctgaacggccaattccggccttcccgggaaaaactgggggaacggtattttaatgatgcttcccattgcttccaggggtggcagagctgcgccacctgccacccggacggccgggtggacggcctgaactgggatctgctgaatgacggcatgggcaacccgaaaaatacgcgcaccatgttcctttcccaccggacgagcccggtgatgacgctgggcgtccgcgcctctgcggaagtggccgtgacggcaggctttgtgcatatccagtttctggaaccttccggtgaattggcggaatgcgtgaatgcgtacctgaaaaacatgaaggaagttcccagcccgttcctggtggcgcataccccttccaaacagcagacggggggggaggggtgcgcccagtgccatgctcccggcgtggaaaggggcgccttgtccgaatccgcccggaggggcagggaagtgtttaaaacagccgggtgcgtgcggtgccacccccatccctacttcactaacaaggaactggtggccacggggacggccacggggctggatgaaggtaaaagcgttctggtgccctccctggtggaagtgtggcggaccgctccttacctgcacgacggccgtgcgaagacgatacgggaagccattacgacatgcaatccgggggatctccgcgggaagacgagttccctgaataaccgtgaactggaggatttgatcaattacgtgcagtccctgtaaaggggcgggaggtcatcatgacggcgaatgtacctgaacgactggaatggtccggaaaaaacggggcggaagaacgcttcttctgcatgacggcggagccgggcgcgagttttgaggaagaactgcaatccctgatggccaggtaccgccatctggggggcggggaagaagatgaattcctgctgcgtttccatgtcagcgacccggtgcgccagttggctccgttgcggcggatgataggggagaggaactcctatgtttccatagttgggcagccccctgcgaacggggcccgcgtggctctggaagcctggcacatcggcggaatgctgggaaaaaggcgtagggcggagccgggcggaacagtcgtggaagccctccgcgctcattaccgtctgttcctggcgggcaagagggaattctccgccccggacagctgcggccagatgcgggaggaattccgctggctggaccggattgccgccttacaggggggagccgtgccggatttgattcaccgcacctggatttactgccgggacattgacaacaactaccggggattggtggaaggccgcaacggatgctttgaccgttacgggctgacggcggagagccatttcatcgccagtaccggtattgaaggctgtacggaactgccgggccgcctgctgcatatggacagtctgggcatcgcggggctggagcccgggcaggtccggtacatggaagcgccggactacctgtctcccacgcatgtgtaccgggtgacctttgagcgcggcgtccgtattgtgtatggggaccgctcccattatttcctttccggcaccgccagtattgacgcggagggaaacattgtccatccgggggacgtggtgggccagacggcccgcaccctggaaaatatgagcgccctgatggaaaggagcgggggaagcctgtccgacctgaagcaggccgtagtgtacctgcgcgactgggcggaccgggaaacggtccggcaccggctgatggactctccgctggtcgcagtgccgcatgtgatgctgaaagcccctgtctgccgccccggctggctggtggaaatagacgggatagccgttaatggagccggagaggcagcctttgcccctttgtaaatcctgccgttcccggaaccttggcgcacgggcgatttcccttgttatcccgtgcacggaaatggtatcatgaaagcgcatgacttatcgccttaatacagaccgtctggtatttttttccgtgctgttgtgggtgctgttgccgccgggcgtttttgcctgggaagggaatcctccgggtccggataatgtgcggtggctggagcagttctgttccagctacatgcagtttttgaccctgggcggcgtgttgtgcgcggtgattggttttgtgtgcgccgtcctggtctggctggtgcatcgtctggactgggcgcggagcttgaaaatcagcgtgctgtttgtcatgtccatcctgtgcctggtcttgtatggcggctcgctttcctttgccgtgttttatcttcccctggccctgattaaccccgccgtgtattgtttcagcgtcggccggacggaatgagcggagggggatttgaaggaatagaaggaggattctaaaggtttttaatgaaaatattatgccgttgcggcagaggagggctgaatgagagttcctggcggcgacggagtaatgtttctcctgggggaagatgagactttatgattttattttctagtgtatctctttgattttcaaaggtagcaagatttaccccggaggcgtccgcggcgagaacggctccgggtgtttatgctttttataaagattgcggatgtaatgcgcggatgctccagtcaccgaatccttccccctggttgcgttccgccgcaaaacgtgcaaatactggtcggagcacctctgcgatttcctttacgggtacagattcctgatagatgaagcccagcctgtctcctcttctggaaccgcccatccagatgttgtacttgcccggacctctgccgacgaaagccagttctgccagatatggtctggagcatccgttgggacacccggtcatgcggatggaaatgtcttcgtcccatagccccagttcttttaactgcggttccagttcatccaccagttttggaagcagcctttcggagtctgtaagggcctgcgggcaaaatggcaggctggtacaggcggaggaattgcgcctgagccccgaatcgttggggagaagattgtacttcccaatgatggatttgatttgctcggcagtatccggtgtgatgccgtcaatgaccagattctgattgcctgtgatgaaaaaatctccttgatgaatggaagctatttcatgaaaagcggttttgagctgttgcctgtttgaattctggatgcggccgccttcaatttcaatggtctggcggccaggaacatctgcggcgtctccgttcgtagataatgaaaaaggtctggccgcttgaagcgaaaatggaaggcgtgttgcaagttcgttagtgaaccagcccagccctttgccggcaatggtgtacctgagccgggatgtttttctgttgcagcgggtgctgaattctttatggatcaaaagcacctgccgggctacttcctccacctgttccgggaaacagaatccgataatatccgcaaggcgggggaaagaaccgggattaccgtaagcatagcccattcctccgccggccagaatgtcatatcccaggagtttcccctcttttgcaatagccacgaagctcaggtcctgagcgtatacatccacatcattttccgggggaagcgtaaaagcgattttaaatttgcgcggcaaatatccgggaccgtacaaaggctcctcctccgcgcccgagtagatacgtttggcatccagccatatttcatgataggcatgtgtctgcggttccagtttccgggagagttcccgggcctgattgaagactgtctcatggatgccggaatcttccgggtgcagagaaaccatgacattgcgcgtggcgtctccactggcggcaatcgtggtgatggccgcgtggtggatgtccttcatggtctgtttcaaatcctgcttgacgactccgtggatttgaatggcctggcgtgtcgtaagtttaagggagccgttgccgaattggtcgcttagcgtttccgcggccagccattggctgggcgtcatgcggcccccggggaggcgcagcctcaacatgaataaccagtttctttcctgtccgtttttcttccggataagccgttcatcccggttatcctgctgggtaattccgtggaatttcagcagaaattcttcttcggacgggaaatgggtaatgccgccgtcatgaaggaggccagagatgtttcctctgaggaaatcgctttcctccttgattctttcgttggatgtgtatccttctttaatcataatattttctgtgggttaagctaaattagtcccccagcgtctgtagatggcttgttccaggggggagaaaaggagtttgtctgagagcagtcctatgagaataataacgaacatgatgcccatgacctgctccatggaattgagctctcttccgaagtgcaggagctgtcccaatcccagtcctgtcaggatgggaacaaaaatttctgcggacatcagggagcgccaggagaaggcccagccctgcttcatgccgctgacgatgaatggagcagaggccggaagcgtgacgaagagcagagtgtaggcagagcctgctcccattgtccgtgctgcgcgggcataaatcggagggacgttggcaagtccattttctgtggccagtataaccgaccagacggtacccatgacaacgacgaacaggatggccgcttcttcctgaccgaaccacaggatagccagaggaacccagcaaacgctgggaagcccttgaaatcccaatgccagaactccgatggtgtttctcattagctggaaacgggcagataaaagtcctgccggaattccgatggagattccggccaggtaccccaggagcagtctccggatagtaacgaccgtagcggaccagagagaattgtccctgattgcttcttcaagatagccgcttatggcggaaggcgccgggaataggaaaggcctccaccaaccggatagagaaccgtattcccatatagccatgaccagcaagatgaataccgaggattggagaatattttttatggaagggtgcatgatgtttgtgcgtcttgtttttcttctgcggttctggaaatcgattttaatgcccgtgtgatgtttgaagatagacgggccactcccggatcattgatttggcgcgggcgcggcaaacgaatgcagaattctccgcaaatacgtccagggtgggatgaaaataagatgactctgtctcccaggcatacggcttcccgtacattatgagtgacaaagacgacggtaattccatgcccggcacaaatggcctggagatccgcataaagttgatccctggtcatggcatccaatgcggcgaagggctcatccatcaggagaaccctgggacgcaatgcaagggcccgggctatggctacgcgctgtttcattcctccggagagttcatggatacgggcatgagtaaagttgtccaagcctactgatttcaggttttccaaagctatttggaagcgttttgcgcggggaattccggtaaatcggagaccgaattctacgttgtgcagcacgtttaaccacgggaacagggcgaaatcctgaaaaacgactgtcctgtccggaccaggacctgagattatttctccatcataggagatgcttcccgtatccgatttgatcagaccggcgatcatattcagcagagttgttttgccacaaccgcttggacctaccaggcagatgaattctccttcccctatgtccagattggcggaagaaagcgccagaagcgatttttttctggaaaaataacttttggaaacgtttcgtatggataatctactcatggctgggattatttttatcattccggatgatgccttcgacacggggaagttccttgtaaaatccagtccgtaccgtatccttggcaaatacttggagcttttcttcggatattttattcgtgaaaactaacctgggccatgcatggagaattaaagagggatcaatgctggaacgggtgagttccttcagttcttctacgacaattttttgagcttcctggggatgttcgatgatccagagagtgagttctctgtgagcttcaataatggcctgcgccacgtccggctgtttttccagaatcctcttttgggctgtcagaacagtagttacggcatccgtttcaagaaacaggagcttgcctccggcttctttttccaggcggctaatccatggttctacagtccaggagccgtccagtttgccttgacgaaagagagatatctgttccggattgggggtaggaagtatgcttgcgtctcctccggattgagtgactgctacgcctcccagggccaaccatgtccggcaggctatatcctgagtattgcccaattggggggtagcgatgatttttccttgaaagtctttttgtgtccatgctccggaatggggaggaacgaccagtccggcccctccctgtacggctcccgctactatttgcaggagagttccgttggatttggaatacgcattaatggcagggcccggaccaacgtaggtaaaatccagggaattggcgaacatggcttccatggcactggggccggcgttgtaagcataccatagaatggagatgtttttccccgtccgttcaaagatgcgtttttcaaaccatccctccctcgttcggctgaaatgcctggcaaccaacccctggacatgggttacgttggggaaaaggccaaagcgtatttgatcctgccgttcggatgcttcccgacaggatgccagaaaggcaggggacaggagggcgccaacgcagagcagcgtgtttactgcaagaggcaaaatcttcatgaaatgagggagcaggtgtttggatgggataaaattaaaattccacatagagagtgcgcgccagaagagacgcagtattttcattcgcttctgcggggggaaggatgcggtctgccgtttctggcgcggagacgacattcccaagccagatgcagtaggctccctttgcttttctgggcaggacgggaaggcccggcagcgctgcaatgctcatgagccccgcttcggccagcaggcctgaggcattgacgatttctctggcggatctgccccatacgccttccgccttaaaatccagaccgtaggtatgagccttgagccggtggagttcccgttccagctgtttggcgaagctgcgtgctaggtcgctgtcttctcccgctacgtaaatttgttttccgccatgcccgaaagtttccatgcgttcatcgcttgagacgaatgtcgggagttgttcctgttctttttcaggaaccttatctatgtgagagggacggagcattcctgctcccgccgtgacgttattcagcgggtcaatcaggatgaaagctcctccggagcggttatcccggtaataatcatagaacaggggagaagcggtttccagaacgatgcggccgacatggttcagaggaagctgcgttgcatggcggctttccagtgtattgacgtctatgtcgtactggagttctgctatccgcccctggatatttctgcccgcatggcgtataatgtatttgcctccgggaagaaggggtttttcagacatccagatgacacgggcttccagccgatcctcgatatgggggagattcccttttttgacgatcatgtcaccgctgctgatatctatttcatcctcaagttccaatacgacggactggggagagaatgcttcttccaggtctccgtccggagtaacaatccttctgatccggctgttttgaaacgaaggcagcgtcacgatagggtccccccggcggatggagccggaagtaatggagccggcgaacccccggaaatcgagattggggcgtatgactgtctgtaccggaaagcggaaatcccggagattcctgctgtcgctggcatccagcgtttccaggatggaaagcagatgatcgccttggtaccagggcgtttttcctgttgtttgcgtcacattttccccttcaatggcggaaatgggaacgaaacgaacatccgggatattcaactgttgcgtgaagcttccgaattcttcttcaatcttccggaatttttcttcagagtaatccaaaagatccatcttgttgacggctacgatgaggtgccgtattttcagaagggaggcgatgaacgcatgccgtttcgtctgtgtgagtactccgtggcgagcatcaatcagaatgatggccgcgtccgccgtggaagctccggtggccatgtttcgggtgtattgttcatgtccggggcagtcggcaatgatgaatttgcggcggggggtggtgaagtaccgataggctacatcaatggttattccctgttcccgttccgctttaaggccgtccagcaacagggcgtaatcaattttacctgccccagcggttccatttttttcactggctttgcgcagctctgccagctggtcgtcaaaaatcagtttgctgtcataaaggaggcgtccgatgagtgtagatttcccgtcgtccacggaaccgcaggtaagtacgcgcagcaggcttttattttcgtgttcgttcaggtatgagtcgatgtccataatggtaaaaataagaggtgtcgtcagaatggttcataataggggttaaaaatatccttctcgttttttctgttccatggaggcatctccgtcgtggtcaatgatacgggaagaacgctcgctcagcctggtttccagcatttccgccacaatctcttctactgtgcgggctgtagattctatggctccggttagagggtaacagcccagtgtgcggaaacggacggttctcatttgcggtgtttcccccggcttcaaaggcaggcggttgtcgtccgccataatcagggatccgtcacgttccacaatgggacggggtttggaaaaatacaggtctacaacctgtattttttccaggcggatgtattgccagatatccagttccgtccagttggacagaggaaagatacggacgctttctcccggattgatacgaccgttataaatgttccataattccggccgttgattttttgggtcccattggttgaatttatcccggaaagagaagattcgttccttggcccgtgatttttcttcgtcgcggcgggcgcctccgaatacggcatcatattttcctgcggtcaacgcctgaatcaatgcctgtgttttcataatatccgtgtatttgcggctgccgtaagtaaaaggattaacgccggcggcaatgccctcctggttactgtggacaatcagatccagatcattttcctgaacgaatctgtcccggaattctatcatctcgcgaaatttgaatgtggagtctatatgaagaagcttgaatgggagtctgcccggatagaatgcctttttggctaagtggaccagtacagaggaatctttcccgatggaataaagaagtacgggattttcaaactggctgatggcatcccggaaaatgtgaatgctttctgcctccaactgctttagctggctgagtctgtaaatgctgttcattttatatgtttttggttatcaatgtcttggtttgcgatgtaaaccgcactccctgtgttcttttttttcccaccaccatcgtccgtcgcgtacatcttccgtcctcttgacagatcttgtgcagcaggcgcacccgatactggggaatcctgcatcgtgaagaggattgtagggaacgccgtaggcgcggatatagttccagacatcttcttctgaccagttggccagtgggttgattttgatgatgccgttcgcctcatcgttttctgtgatatgaagccctttccgggtgatggactgagtggagcgtaagccgcagatccatgcttttttcccggcaagtagtctttccagagggcgcagtttacggatattgcagcattcgtgacggtattccatactgttgcggaacagattgacgcctttgtccagaatcatgttttccacttcttccgctaccggaaaataaggaataatgcgaatgccgtatatttcctccgttcttgcccagagttcataggtttccggaaacaagcgccccgtgtccagagtcgccagaggaatattcagaccaagatgggagatcatatgggtgagcacttggtcttctgccccgaatgatgtagcaaaaacaaggtttccttcgtattgcgctgcggcttgtcgcaacgtgtctgtagcggttggggaatgagcgttcatgaatgttggagctggttggaggtggatagccgtatccggtagaaaagaacgggatgtcaaatgaacagaggagttgagtagtaccgatccgctgaatcggggaggatcactactacatttttccctgtgttctcttttcttttagcaacctggacggccgcccatagggcagctccgctggaaatcccagtcagaatgccttctctgacacccaattctttagctgtggaaaaggcatcttcgttggaaactgtgatgacttcatcatagatatccgtatccagggtttctgggataaagccggctcctattccctgaatttgatggcttccggcctggccggcggataatacgggggaatctgccggttccacggcaatgacggtgattcctccgggtttgcgttccttgagcagtctgcctatgccggttattgttcccccggtgcctactccggctacgacgatatctacttctccgtccgtatcttcccatatttcaacacctgttgtttcataatgggctctgggattggtcgggttggtgaattgactgggaatgaaggagcccggagtggcggccgccagatcctgggctttggcgatggctcctttcatcccttggctgtcttctgtcaggacaatatcggctccgtaggcttttagaatatttcgtcgttcaacgctcatgctttccggcatggtaagaatgatgcggtatccccgggaagcggcaatagccgccaggccaatgcccgtgttgccgctggttggttcaatgatgacggctcctggcttgagctggcccgatgcttctgcctcgttgatcatggcgagtgcgatacggtctttcatgctgcctgccgggttcaagtggtccagcttgagcaggagccgggcattcagacgatgtgcctgagcataattccttggctccagaagaggtgttttcccgaccagttccgatatggaggtgtaaatgttcatcgcgtcgtactttacagggatggatttagatttctttttattccgataggaataatagggattatttactcttatccttcggaagtgtcaatgtgaattaatgaatatgagatattatttttttatttgtttttttatgtaaataaaaatggtagaagagtattgaatgaacagtcgcaaaatggcagaaactgagagcaaaagcccggttcccctctgttttcaagctattgaccgggagggaggatgaatggtgtgagggacagaggtcttgatccctggccttcctagagcatgtaattggataggctttctccggttgacgttatgaattttcctttttccggagagtgattgcggcgtttggaaaactgtctgttttgtccaaatccatcctttatcgcatatccttagaatgtctgttttctatatgctgataatctatcagttgtaattatctggaggatgatgtgcaagaaatgccactgctgaaaagctgatccgttaagccttatggaggaagcttttgacacacgaaaatcggatcatgtcgtttatcatgacctctctttgccctgcatggcggtttctttttccccccggctatgatgatcgccccggagattctttcggctcaggcaacagggaatcgccgtgcgggcaggaattgttttatttttcttttccgtggcggatgtccgtggcttccttcaggaagacgacggtggcggcgatggttttggcaatgtctccgatacgttccagagaacggataatgaagagaagattgacgttgagggcaggggctcccgcccgttcggggcagaccagaagggccagcgctttgcgatgggctttgtccagttttttgtcgcgcaggcgtatttccctggcggcgtccacatcctgcgtttccagacaccgggcggcgtctctgaattcggatacggccatttccagcagagggagcacaatatccggggagagggattcctgatgcctgatggaggccttggcatgcttggcgatgcccgttacttcctccatgcattcctggagcttgtctccgcaccgggagaaggtgatgacgagcctcaggtcgcgccccagcggatggaactgggtgagtacggaggagcagagggagagaacctgctgggtttcttcctgcagcgggtcgctgtccgcaatgatgctgttggccccgtcgctgtccgggccggaaatgacctgttccagaatgtccatgtatttcagcaggctgccgcagatggcgttgacgcggaggcggatggcgttcagggccgcgtcgtagtgggggaggatgtgattgccgggagatgtcatgaggagaatggtttggaaagggcttttagctgaaacggcccgtaatgtaggcttccgtttctttttccgtgggattggtgaagatttgggacgtttccccgtattccaccaggcggcccatgtacatgaaggcggtccggtccgcgatgcgtgtggcctgctgcatgttatgggtgacgatgacaatggtgagttcttttttcaggtcttccatcaggtcctctatttttaaggtggcgatagggtccagggcggcgcagggttcatccatcagcaggatctgggggcggttggcaatggcgcgcgcgatgcacagccgctgctgctggcctccggaaaggccgtaggcgctttcatgcagcttgtctttcacttcatcccacagggcggctcccttcaggctgcgttccactgtttcgtccagttccgcgcgcctgttgcggccggccacacggaggggaaagacgatgttttcgtaaatgcttttagggaaagggttgtatttctggaagaccatgcctacgcgcttgcgcagggagatgacttccacgcgcgggtcatacaggctggtgccgtcaatgcggatatccccctggtggcgcacgtccgggaccaggtcgttcatgcggttgatgttgcggagcagagtggattttccgcagccggagggcccgatgagggcggttacccggttggtttcaaaggtcatgccgatgttgaagagaacctgtttgctcccgtaaaagaaggagaagtcttccacttcaatgatgggctcgtcgtctgcggcggctggttcagtcatgggatgatgaaggagaatggggttagaagctggaggccgcgtattttttgcgcaggcggttgcggatgaggatggccgtgagattcatgaccaccaccagcaggatgaggagcagcgtggtggcgaaaaccatgggctgggcggcgtccgagtccggagactggaagcccacgtcgtagatatgaaagcccagatgcatgaatttgcgttccaggtggatgaaggggccttccccgtcgatgggcagggagggggccagcttgaccacccccgtgaccatgagcggggctacctctccggcgccccgggccatggccagaatgaggccggtcatgacgcccggcagggcgctggggaggatgatgcgtttaatcatctgccatttggaggccccgcaggccagggccgcctccctcagcccgcgggggacggcggagagtgcctcctccgtggagacgatgactacgggcagcgtcatcagggccagcgtgagggaagcccacaggattccggaggtcccgaaggtgggcgtgttgtccacagccagctttttccagtagaaaagttcgtcgatggttcctcccagatagtaaacgaagaagccgaggccgaaaacgccgaagacgatggaaggcacgcccgccaggttgttcacgcagatgcgaacggcctgtaccagatgcccctgcctggcgtattccctcaggtagatggcgccgatgacccctacgggcgtaaccagcacgctcatgagcaaagtcatgatgaaagtgccgaagatggcggggaagatgccgccctccgtattggcctcccgcggatcatccatgacgaaatgatacaggctgtggaggaagacgccgcatttgccggagaatcccaggtcattcggctggtagccgtaaacgattttatccatgcggatttctttcttttccccgtctcccagggcatacacaagagagtctcgtccctgttgctccctcagtctggctgcttccgcggtgtaccgggcgtattcggcgttgagctgttccactttggcgcggagccggtccagttccccggccgggtcgtccatatccgtgagaatggggtttttcctggggacggccgtacgccgtccgttttcttcccggatgtcgtaggaacgttctatggccttgatatccagtttggcatctgccagccgggtattgacggagcctatgtccctggtgtcaatggctttgatcctgtccctcagttccgtttcccggtccagcgcacgacggaaagccgccatgaattccggtgaggcggcggggatggtttgcccggaggacagcttgagttccagaggtctgaccagggctttccctccctccatgcgttccatgcacagaagtcctttgggagtggcggaggccgtaatgttgtgcgcgtccacatagcggtaggattgtccgtagatttccttgctgccggtgaagagctggtattcccgcacgtctctggccgtggagccggggcgggcggggtctgcgggaacatggcgcgtctggtctttcgtgatgccggcgtacaggacaagcggttgttcttcttttgaagagggggcaatcgtcagttcatgaatggttttgggccagaatgcttccagaccgttgacgacgatgatacccagcaggccgaaaatcatgatgaggcccagggagagcccgatggaggtaagccagatgttgacttcccccagcgggcgtttgggggcgggcggtaggctgaagtcctgtttcatggaaggtggatggatgggaagggatggatggttcacacgacgttgaagcgtttgcggagacgctggcgtactatttccgccagagtgttcaaaatgaatgtcatggagaagaggataaggccgcccaggaagaggacgcggtagtgggtggagtcctgcgccgcctccggcagctccgtggcgatgttggcggagagggtgcgcatgccgttgaagatattccagtccatgatgggggtgtttcccgtggccatcagcacgatcatggtttcccccacggctctgcccagacctatcatcagggcggagaaaatgcccgcggaagccaccggaaggaccacggtgcggaccatctgccagcggctggcccccagcgcctccgaggcggcgataagggcagggggaacgttgctcagggcatcctcggaaatggtgaagatgacagggatgacggcaaagcccatgatgaatccaactaccagggagttgcgctgttcatagggcatgccgaatccgttgcgccacaggtctgagaaactggcggcctggaagtccccggcgccccacaggcccatgacgctgcggcagaggctgatgaggggctgttccagccagtagcccagatattcccagcagaaccaggcgcagagcaggatgacgggagtcatgacaatgtattccacgccgcggctgaatttgttgcgccaggctgcgggccgggtggtccagaaccatgcgatgagggttgccaggccgggaatgaggatggccatgcagagcagggcgggaaccttgtcttccattctgggggccaggtaaagggctccgaagaaacccagcactacggaagggagggaggccatgatttccatgacgggttttaccacccgtttgacggcaggagccatgaagtgggccgtgtaaatggcggccgtgaccgctaccggaacggcgaagacaagagcgtacagggtgcctttcagcgtgccgaagaccaggggcatcagggacagcttggattcataatcgtccgtgccgcccacggattgccagagccatttgggggaatcgtacccctcataccatattttcccgaccagggctttggaaccggcttccgggtgcttgtcttccatggagaagaaatgaatgtttcctgatgagtctatggcaatggcggaattgaattccgtattggcggccagctggaccggaacgaattccagaggaccgctgttccagcggatatcggccgtggttccgtagcagagcctgagttcccgcggagtggagaccaggaaggaacggttgatgccggaagccgcgtagtgctgcaccggaccgtccaggggagagaattgcctggtctggccgaagaggcgcagggaggtgccgtccggacgggtgtggggataaaggctgaaaattttaagacttcccttgtcgcctcctatgaccagggacatgtctccgaaaagccagttgacggaagtcattttttccccttttcccagcggagacgggatagtctggcgtctgacccatgtttccccgttttcatcataggaaaagtaaagaagtttgtccgtgtccgtggcgatgacgaggctgtctccggaggctccgggcagcatggccgtggggcggccttccagctggtccgtcaggtcatggaatccggaaggagccagttccccttcatgaagcagggagcgggattcttccagcgtcatcagcaggaggcgcgtgccttgttccgtctccacggttgcggtgaatattttccgttctcccgcgtccgcataggctatgccggatattttgccggggacggagccgctttccgtcagggggtagagagggccggcctccgctccggctttgtccgggccgtgggcattcgtccggccgtggacgttgagtccggaatggacgtggatgaggcctaccttgccggattccgtagcgatagggtaggcggtgagggatgcattataggaatgggcgcagacggtttcgccttccggcagggtaacgggaacggaggacaggttcccggtagttttgtccaggaagaagatgttttttccgttgccatagacaaagggaagcgtgccggaagggtccaggccccaggtccccggaaccggagaggaaggcttgaggtgctgccgttcgtccacgtccgcgttctggaagaggggaaccgtgacggccagcaggaagaaaagaatgccgaaaacggctacaatgacggtgaatcctccgccgatgatggttttggtcatgatgcggtcaaaccacagcgtggtttttgccacctgaaagcgttccggaacgggtttgggctttctggaaggtgcgggggagggagcattggaactcatgacggcagagaggagaagttgaagggcaggactccggcgggtgggccggagtcctgccccggcatgtgtttacggcacgggaagggagtgtttattcaatgctcttgagcacttctgcgctgactttggcgggaatcgggtaataaccgtccttggtcacgatttcctggccgtctttggatacgatgaacttgatgaattccctggtcagggtgtccaggggttctcccggtttcttgttgacgtaaatcagcaggtaacgggagagcgggtatgttccgttgatgcagttatcataggaaggctgtaccgccgcctgtccgcttttttccgccagggagagggtttttacgccggaggtgacgtatccgatgccggaatagccgattccctgttcgtcggaactgatgccctgcacgacggcggaggaaccgggctgttccttcacggagtttttatagtctccctttttcagggctatttccttcacgaacccgttcgtgccggaggcgctgttgcggccgtagatggagatggctttccctttcatggagggaacccccgcatcgccccagtcggtgatattggagccgccgcgcttgaaagtggaggagaaaatggagtcgatctgcgccagggtaagggcctggatgggattgttcttgttgacaaagaaggccacggcgtccagggccactttgatttccgtcggcttgtagccgtatttggcttcaaaggctgcgatttcctcccgcttcatctggcggctcatgggggcgagctgggccgtgcctgccgtgagggcgggcggcgctgtggaagagcctttgccttcaacgccgattttgacgctgggatattttttgctgaatccttccgcccagagggtcatcaggttgttcagcgtatcggagccgacagcgttcaggttgccggaaacgccgctggagggcgcatacggcttgatgctgttgtcaacggtcacttgactggagcccatgctcagggagctgagggcggcggcgatggtcaggattttggcgacgaatttcatggcgtctttttctgatgtgttgcgtcttccgtttctatgccggcggggccgttcattgcggaagacggggtagtgatactctcccgcccccatggtggggaagagaatcctggttaagaaatcgtcacaaacccggagtagccaggaagccctgtttttgggataccatgcgttcagaggcgcaggtcgcgccattagaaaaacatgactccgcatccagcagcagccgaccagaccgccgtagaggtggattccctgaatttttgttatgggagcaagcaagccctgttcaacgtcaccatgaagattcccaagaacagggtaacggcattcatcggcccttccgggtgcgggaaatccacgctgctgcgctgtatcaaccggatgaatgaccgtattccggaggcgcgcgttacggggggctctatccgcattgacggggtggacgtgacttccccttccctggatgccattcgtttgcggcgggaggtgggtatggttttccagaagtccaaccctttcccgatgagcatttatgagaatgtagcctacggattaaggctggcgggagtaagaaaccgcggcattctggacgaggctgtggaggaaagcctgcggcatgccgctctttgggatgaggtgaaagaccgtctccatgcctccgccaatggactttccggcggccagcagcagcggctgtgcattgcccgctccattgccgtgaagccgcgcatcctgctgatggacgaaccctgttccgccctggaccccattgcgacagtgagggtggaagagctgatgcaccgtctcaaggacaagtttaccatcattgtggtcacccataatatgcagcaggccacgcgcgtttcggacctgaccggttttttcatgttgggcaggctggtggaatttgatgctacggaaaagattttttccaatccctccctgaaagaaacggaggattacattacgggaagattcagttaacagagaaacaattatgcttttttcaaagaacatttccaaaggaggagccgggcgtgtgccccatgtttccggcactgggcggaggctggctgccagcgccgccagaaagaacagtctgcgcaggctgcatcttttttatcatgccggcaaaaccttatccaatcatcaagccaatattccgaatcatgaatcacgacgcgcacaccctgagggagtttgacgccgccctttcctccctgaatacgcatttgctccagatggcctataaggcgcaaagcgcccttgatttggccgccgccggccttttgcagcagaatgagtcttccgccaaccgggctatcgctgatgacgaagaattggacgagctggaaatgacggtggaccgggaagggctgcatctgctggcttttttcagtccggtggcttccgacctcaaggtggtgctggcttccctgcgcatgtcctccatgtatgaacggattggtgatgaggccgtgaccatcgccaaaagggccaacaggctgaataagcgtccgcgcatccgggaggctgccttggcggatcccgtctatcgggaaatggcggagcagttcagagctgtgaataaagctgtttcctcctgggacggggaggctctgaaggtgcttgtccctgcgctggaggatttggcggggcatgcggcgtccctgacggaggcgtttgcctgcttgcctgagcaatatcaggataatctggtttccgttgcggatctgatttttgtgggccgttccctggaacgcatggcggaagggctccaaaaggtagcggcggaagggctttacgcggcatcctgacaccgcgtgcctgaacgggaagaacggcggggggcgttgttgaagcgcctgttttttgttcggaaacgggattcaggcaggccgcctatctgacagtccaggtaatgctgcgcatggcggattggccgggacgcagaatgacgctggggaagtgaggggtattgacggcgttggggaagccctgggcttccagcgctattccctggcgcgcctggggcaggtattccccggtatacacctgaagcccgggagcgtccgttgccacaatcaggcggtgccgggattccgggtcaagaaggatggctgcaatcttgtcccccggttcggagtccagcacgtagttgtggtccagtccggcggcggtatccgggtgggcggaggagttgcgttcccccagcagggccgctttccgcaggtcaaagtccgtcccttccacgggaaggatacggccgtcggggatattggtcgcgtccaccggagtataggcggaggcccgtacctccagagtcatggaatcaatggtaggcttgccggacaggttccagtaagcgtgattggtgaggttgacgattgtggctgcgtccgcatacgcctccagacggagatgaagggtttcttccaccacggtgtaggtggctaccacttccaggttgccggggtaattttcctcaccgtctgcggagtgcagggtcagaaccagcgtattgcgcccggcttcctgcacctgccagactttgctgtcgaacccctggatgccgccgtgcaggtggttggggccgttgttgacggccacggtgcgggaatccccgtcaatggagaacctgccttttgcgatgcgattcgcgacacggccgcaaatcgcaccgcaataacaggtgtctttcagcatgtcttcaaagtgcttgggccctacgatcatgtccatgccgtccttgacgacggagatgatgcgccccccgtagttgctgatgcgtaccgtcagcttgtcggaagacagttcaaacaattctacaggtgcgccgccgggtaaggtgccgaagatcatgccggtatatagcttggtcagtagtggatgtccaattaataggccagcacgcgggaaccgttgttgccgatgatcacgcgcacgcgctgcccgacctgaatcgggttgttcctgctggcgacctggacgaccgtgtagttgcgggtgccgttcctcttctggtccagacgcacggtgatgcgttccccggtcgtgttgttgacggccttgtcaatctggttgccggcaatgccgcctagaatggcgccgcccgccgccgtcgcgaatttggcgttgccgcccccgaacatggcgccggtcaacccgcccgccacggcgccgattccggtgccggtgttggcgttattggcctggatcttgacgttttccacgctggtgaccgtgccggtataggtttcctgggctccgccgatttcgttcaggttataggtgttcggggaaccgaagttggtgcaggaagtaatggacagcgccatggctgcacagccgatggtaagaatggaagctgttttcatgatgacgatttataaaatgggttgaaggttaagatcaagtaatttcgcagtcaacggaaggggtgcggctgccctcttccggcggagaaaacccttgccggaaggttccggcaagggttcttatttatgttaacggtccgttgggtcaggccttgggggcttctccctttttggggcagtcgcagggcttttcccctttgctgcaaggctggccgcatttttctgggcatttgccttccttggcgcatttcttggggcactttttgtctttcttgcagcacttctgggcagcgggggcgggggactccgccggagcggcggcttcctgagcgtaaccgttgacactgaaggcgaaagcaaaggctgctacagcgaggatttttttcatataatgatatgtgaggttgtgtggtgttggtaatgcagcggcagaagagctgccgttctacgacagatagagcggcagggagtgatttttgttcaaaaaaatacgcggagaggattctttttagggcggtttttttgatgaggacgcgcttttggcctccggggtaagtttgacagtccgggggcacgtacggagcgccggcttgcatggggcgccttcttgaggcacggtagggaacatgagttcagccaaggaacctgtgacgcgccgttttggaaatggtttgacggttttgattaaggaggacaagtctcatcccgtagtgtccctccagtactgggtaggcacggggtccatgaatgaggggcactggcaggggagcggactttcccatttgctggagcatctggtgtttaagggaacggcgcatttctccgggcaggaactggcccgcaaggtgcaggaacgcggcggccactggaatgcgtacaccagcgtgaaccgcaccgtgtactatatagacggccctgcggagtcctggcagattttcctgaatcttctgacggagcttgtattttttcccacgttcccggaagacgagatggagcgggagaaggaggtggtgcgccgggaaatggccatgtatgcggatgatcccgattccgtggcctaccagcttctgatgcagacgctgtatcttaagcatccccgccgctggcccgtgctgggtgagcgcgccgcctttgactgcctgacgcggcaggacgtgctggattaccatgccagccgttatgttccgaacaacgtggttctttccatcgcgggagacgtggatgccgcggagattctttcccatctggaattgctggtggaaaacctgaaatcccgtcccctgaaccgggaacccattccccatgaacctcaccagttcggttcccgcagggtgcggaaggagtttgccgtgccttactccaagctgcaccttgcctggcgcctgccctgttccgcccatccggatacgccggctctttccgcgctgtccagcattctgggaggcgggcgttccgcgcgtttttatgaaaagtttcatgaccgcctgggcctggtgtacggcattgaagtgcattccaaccagtctgagacggatgagggggcgtttaccatcagcatggacgtggaccgcgcccagcgcgacaaagtgcgggatctggtgcttcaggagcttcgcaatctggcggaagaggattttacggaggacttgaagagagtttgcaaacagacccgggtcagtcgcctgcgccgcaggagttccgcttccgggatggcctcggaaatgggagcggactggttcggcgcgcgcaatttgaacctgtcttccgaatggcaggaggctattgaacgggtgactacggaagatttgcaccgcgtttgttccacctggctgtcttccccaaatgtgacggaagtcagcctggacccctccggcagcaactccggggaagaagaaggggcagcctccgctgcgggaacgtccctgagcgagcatgttcttggcaacggcatgaaggtggtgatccgtgaagaccatcgcctgccgctggcttatgcctgcatggcgttcaaggccggatgccgtgcggaaaatgagcatgacgccggcgtgacggacctgatggccgagtgcctgctgaaaggaacctccacccgttccgcagcggatatagcccgttttctggaggacatagggggcgccgtcaacacatccgccggaaacaattccctgagcgtggggtgtcaggtcctggcggaagacctggacgccggactggagctgatggcggacgtagtcatgaatccatctttcccggaagacgcctttctgaaggaacaggagtcttttgtggcggatgcggaggaggatatggaagaccctctttccgtggcgttccggcaggagaggaaggtggcttacggacatgtttcctatggaaattccccttccggcacgccggaaagcctgtcttcattgacggttcaggatatcaaaagacaatatgaacgcattatctgcgcctccaatgccgtgatttgcatttccggggatgtcaggaaggaggaggtcctgcctcttctggaaaaacatttgggaagcatgaggacggggacgcctccgatcctgactcccactccagcgctgcgggccggccgggaagtggccgtgctggacaaacagcaggccgtgctggtagtgggggtgccgggcgtggatgtggcttccccggagatggcccaggctctgctgttccagtcctggtgcagtgatatggccggtcccgttttcaccagtatccgggaggaggccggactggcctattatgccagttcttccctgttcatcggcatggatgccggaggcatctgcttctatctgggaacctccccggcacaattggaggaagccgggcggaggctggagaaaaccctggagatgatttatgaacagggtatgacggaagatgagctggaacgcaccagggctgccgccctgtcttcccgtctgctggccatgcagtccaatggaactttgtgccagatgctggcgctggatatcctgttcggtctgcctctggaagcgtttgaacagcaaacgaacgcaatcaggaagatggatctggcacggatgaacgcctttatcaggaaggtgctggaccccgcccagccgcgttcctggtccgttgtgcgcccgtctgccggggaatgattacacggaaaatcattccctctttcccggacaagggaaaaagcaagaaacgggatgatgaaataaagcaaatgatggcatatgcccgaaaacatgatttccccggaaaaaattccgttccggaacggtgccggccgctttttttagcaaaagaaaatatttttgcgtcacatcatctgaataccgggggacgtggaggaatcgtgatgtttattttagtaatggtgctctatagtgatagccatgacagagatggagccggatagaaaaactgcggaacaggcaatcagggaagcatatgaatccaacccgggaggctgggcggaacattcccgctatgtagcgcaggcctgtgaaaatatagcgtcacattgtaaagggctgtccggtgaaaaagcttatgtcctggggttattgcatgatattggacgatatgccggagtaagttccgaaaagcatttaatagacgggtaccgctattgttcggcaagaggctggagcaaggctgcgcagatttgtatttcccatgcgtttatgatacaggatatcaatacttctatcggtacgtttgacgtgagtgaagaggatttcctgttcatgaaaaattttgtggcgaacgcagtctatgacgactatgacctcctggttcagttatgtgattctttggccttgcctacaggcttctgccttttggaaaaacggtttgtggatgtaacaatccggtatggggcgcatccgtttacagtggaccggtggaaaaaaattctgcaaatcaaggcgttctttgaagagaaagcaggctgttccatttatgatctgctgccgggcgtcgttgaaaacagtctccgtcaggagggggcttatgcgtgatgatgcggaagattttttagaaacggcacatcccgatacgctagggtaaatcgcccgggagggggaatttctgtgccggccgactgcgttgctgttgggagtccatgcagggttatcaggcgtttttgacatcaacggctggaggccgccgcgggaggcggcggattcggaagcgcccctcttttctggcggaacgtttgatctgctcatggtaaaagtaattcacaataaccggcggttcgttgaacggccggtgcatgggatcgtcattgcgcaggtacggcaaactccgtttttccgccagctgccgtattgctgcgtccagttcttcccagtagccgcggctgcctttctggtaaatttcccgatagaggggcaccaagtgcggatagcgttttctgatgtactccagaattacggatttgtagctgccccgcagattaaggttttccagccaaaccaggttgcatttgtcttcagcctgctccacaatcgccggaatatccgtaatgcctggaaaaatgggggagatgaagcaggtggtgcggattcctgcctcatggaaggccttcatggcggccagcctccgcgagatgctaaccgccatgtccatatctgcctgaaagcgctcgtcaagcgtgttgacggaccaggaaacgcgggcatggggaaatgtttttatcaaatccaggtcccgcagcaccaaatcggattttgtagctatgctgatttccgcgccgctgtcttgaagctgttccagaagcgcccttgttctcttgtagattttttcctgagggccgtaagggtcggtcacggaaccgataaacagctgttttcccgcgtatttcccggggttgcgtatttccggccagtatttgacgtccagaaaggttccccatggttccggatgcccggtgaaccgtttcatgaacgaggcgtagcagtatttacaggcgtgggggcagcccaagtaaggattgaccgagtaatcggccacaggcagatttgacgttgacaggatgctctttacctgaatttcccttactttgatttcatcagcattcatggttttaaaaagctcctttgcatcccctgctgcacggtatcggaagggagcagatgccccagcagcagcggagagtccgggtcatggagtttgtaattttcacgggccttttgccgattagtatttgcatagcagtatttgcagccgttaaggcaggtgtcatacgcgcctatgtcccggctctcaatgcaatggcagccctgccgcattccttgatgtttcaggttgcggaattgaacgccgttggcctgtcccagaatgttcagggtcatgcagccggaggatgaaatgccgtaacgcgtgtaatctccattggttccgcaggtttgaatagggatgttgtatgcggccgcgatggctcccagccctgccgccagctcctccttgtctttttccgtgagggggattagttccggcatgttcgtttgcagcttcctgtacatttccacaaagctgaaaatgcagcggttgatgtggccggataagaaggacgccatgcgttcaaaggtctccagatgccttctgacggtatattcacttgtcagcaataccgggtcataccgccatgcgatgcggtttgctccgacaatttccgaaagttttgccagcgtggccatgctctcatcaatgccgggaacacccggttcaatttcctttccgtaggccgtaatcgtatagtggaagtaggtatggaagcgctcggtgatgctgttgatatgcggaagaatgggggcataatttttagagcagaacacaacacagtccacctggtccggcgtcagttcataacgggtcaccttatgctggaacaggggattgcgggaaaggacatagccttcttcaaacctcttcagcagccagcgggtgtaatactggacggtgtctgtccgtcctcctgtattgataatcatagcgtgtttttattgatggattgaaatttcagacgcatttgttccgaaaaaaggtcggttaaacggaccagttccgcttgctgttctccgctcaattccgccatggcgtcgttttccgcctgcgcggcaggggggatgatgcgttccacgtattcctttccggctgcggtgaagcgtaccagcctgattctccggtcagttttggattcttcaaaagaaaggtaccccagcttccagaattttttgatggcggcgctgacggtttgcttcgtggcggagaggcgttcgcaaatcccagcctgcgtgcagccgctttgagcgaaatagatgatatccagaataaacagctctttggtggttaacccgtattttttggcgtattccgtatagacggcatattgtttgtcccgtagccggcagtagttgtttacgtggatattgacgctctctttgctcataggcggagatggataaagtatgatatttgatagtctgatatttgacaaaaagaatgtagctattcgcgcgttttttgtaaagccccaaatataaagctccagataaagaggcgggggatagggacggctttttgcgtgaccaggcaaatttccggaaacagtactggagcggcaatggatgccgacctttcaagaatccggtacattttccgtttttattcccgtatcttctgtttcgcggcagaagagttttgttgccgcatggcttcggaagacaggcgcctgtggctaccggggaaacgtttttccatgtttacgggagttggagagcttgcccgatggggcttttctgcaccagagcaagttccgcctgctccggtgactgatgtttcgccggaggcggggagagagcgtggagactcaataaaaaacgcaggcggcgatgcgcctgcgcggtatccggcgatggttcggacagaagaaagaagcagtttttctgccgtagggtatttgcgtaaatacggcatccgtccgcttcctgaagaacgggagatgatccgggcgctcccagcaattccgcttccggagcgggaacggtatttggaaaaaagggcggtacctttttccgttcttcattttcgccgccccctgagaaaccccggcgcgcttttgcgcttttgtggagaagcggcccgtatcaaaaggcacgccagggaagaacagggcggttgtgtttttagccgatttccgtgcggcccagcaggtgggcgccttcctccatggcgaggctgcgcgttttcatgtctccgacgacgcgggcctgttgcttgagttcgcagcggtcagaggtgaccttgccttccacgttgccgtagatgcggacgtctccggcagtaatgtcacccttgatttgggcggtttccccgatggtgacttttcctttgtcggagatgatttcaccctcgatcttgccgtcgatgtgcatgtcattctggaaacggatggttcccttgatctcgatgccggaggcgaggaagttggttacgttgtctgtcattgtcgtcaaatggttggggatgggggtgtttctggtttaaatggtcatgatatccttttccttgacggccaccagctcgtcaatttccttcacgtatttgtccgtcagcttctggatctgcgtttccaggtcgcgctggccgtcttccgtgacaatgttttccgccttgagctttttggcggaatccatggcggccttccgggcgccgcgcacgcgcacgcgggcttcttccgcctgggatttgacaagcttcacaaggtctttgcggcgttcttccgtgagggcgggaatgggcaggcggatggaacggccttccaccaggggattgaggttcagcttgctttcattgatggcgcggccgatgtcgtgaacggtgctcggatcaaagggctggatgaggatgagacggggttccggcgtgctgatgacggccaggcccttcagtttcatgacggagccgtagctggagacatgtacgtccaggttttccacgaggccgggggaggctttgcccgtgcgtacgccggagaattcctgtttggcgaagtccacggccttgagcatggattcctccgtttccaataataatgtttctgcgtccatgatgatggtgggtgctaagtgtttttggcgggttgaaaaggaatgcggggttcagctgatggtggtgccgatcggttccccgagaagggcgcgcgtgatgttgcccggagtatgcatgtcgaatacgatgatgggcttcttgttgtccatgcacagggtgaaggccgtggagtccatcactttgagctggcgttccaggcattcctgataggagatggtgtcgaatcgcttggctccggagacttttttggggtccgcatcatacaccccgtccacggaggtagccttcatgaccacttccgcattgatttcgctggcgcgcagggcagccgtggtgtccgtggaaaagaacgggttgccggtgccggcggcgaagatgacgattttattgttgtccagatacgagcgggccttcaggcggatgaaggattccgcgacatttttcatttcaatggcggactgcaccacgcaggggactcccgcgcgttccagcgcgctttgaagggccagggcgttcattacggtggcgagcatgcccacgtaatccgccgtggcgcggtccatgccgcgcacgctggctttcgccccgcgccagaaattgccgccgcccacgaccaggcctatttggacgccggcgcggtgcgcctgggcgatttcttcagcaatgcgggcgacgatttccggggaaatgttgtccatgctgccggggctgcgcaaggcttccccactgagtttcaggaggattcttcgataggcgggtgcggatgtgtcagacatagatgcggattttacgcagacaagattgaaatttcacggggcaaaaagaaagcaaaaagagattctttattgatttttctccggaggtccggagatttccaccttgatggggcttctgctctccaggctgcgggtggggaaggggaaggaaatgccttcttcctcaaagcggcgtttgatgtcatgggcgagcgttttctggcagtccaggaaattgtctttctggcaccaggcccctacggtaaagcccagggaagagtcctgaaaccctgaaaacgagatgaggggcgcggggtcgtccaggcagaatttgttttgtttgaccacttcccggaggacgtttacgacatgctcaatgtcgcagttatagtccacgcccaggctcaggtcgcaccggcgcgtggaaaaacgggtgatattgctgaccggattcttgatgattatttcattggggatgcgcaccatggtattgttcggcagccggagctggacggacatcaggttgatggagtccacgttcccggtgattccattcacttcaatcatatcccccaggttgatctgcttttcccctaccaggaagaggccgctgatgatgttggacagggaagtctgggaggcgaagcctacggcgacgccgatgatgctggccgcgcccagcagggtcaggatatcgaaccccatcagggcaaaggcttccacgcctataataatgtagccgacgtttttgacgatttttaccgtcaggcgggaggcctggggcgacattttcaatacagtgattttccggagcacctggcagaacagtttcagaagtatccagctgaacaccagccaaaccgccacatgcagaattttaactcccacggactgcaccatttccagtttgagccagtccggcatgttcaggaagtccatggtttttgtccagatgtcttccctggaggatgcgtctgccatgagattcatatgaaggatgtagcaaacgctactgcccggctcaaggggcgcgcgcgtattccccccggtttatgacagttcctccgtcagcggagaggacaggactttcaggcgctgcggacgcagcatttatcccgcaggaaaggggggcggatgtatggccggatatggcatctggttgggaaacaggaaaaagcggggatgaaaaaaggccgttccccggagaggggagcggccttgaaatattgccggagggctgcttacttgctgaggtaggaggccacgccttcgtgggacggggtcatggccgcatctcccttgtgccagccgagggggcagacttccccgtacagttcgaagtgctggagggcgtcaaccacgcggatggcttcatcaatggagcgacccagcgggaagtcgttgatgagctggtggcggacgatgccgtccttgtcaatcaggaagaggccgcggtaggcgatcagctccccattgacttccacattgccgtcttcgtcaatttcctcatctccggccagcacgccgtagtcggcggaaatggtcttgttgatgtcggagacgatggggtaggtcacgccctgaatgcctccctggctgcggggggtgttgacccaggcccagtgggagaattcgctgtccgtggagcagccgacgacggctacgtcacgcttgtcgaattcgcccagggcttcctggaagccgatcagctcggtagggcacacgaaggtaaaatccttcgggtagaagaacaggattacgtactttttgcccttaaactggtcaaggctgaaatccggtacgatggtaccgtttacaactgcgtttgcactaaaatgaggtgccggttttcctatgagaagcatggtcgtttttttggtttggttctaaaagaatgattccaaaaaacggacgaaagtcaagaggcaatgataccgcattcgttccaaaagagcctgttttctcttgaaaatgaagctttttttgtcagtattccctccatgtcatcctcaaaggcgcaacaagatgagtggtccggaaaaataggcgtgattctcgcagtggccggcagtgccgtcgggttgggaaattttctgcgctttccggggctggctgcccaatatggagggggtgccttcatggtggcttacggcctcatgcttgttttggtgggcgtgcccgtggcgtgggcggagtggtccatcgggcggcgcggcggccagatgggcgcccattgcgcccccggcgtgttctggtacctgaccaaagggtccaggctgtggaagtttctgggcgtactggcggttctggggccttcatccgtggctttttactacatggtggtggaagcgtggtgctgcggctatttctggaagatgctcacctgtccggaggtttttgccacggcggaggggacggctcagacttttttcagtttcacgggcatgtacggtgacggaagcgccctgttgtcggacaatgggctgctctggatcgtcggcggggttattctgctgaacctggtaattatttaccggggcatcagcaagggcatcgaaatgttttcgcgctggttcatgccgttgctgcttttgatttccctggtgctgctggtgcgcattttgtgcatcggcacgccggatccctcttatccggaccgcagcatcgaacagggactgggatatatgtggaatcccagcaaagtgctggtggaggaactggaccgggacagcggggattggaaaacggtttccatggtatcggcctcccatgcgggagccctggatgaagccgtgaggcaggtggagatgtccggcggaacccgcaggctgactgaggtgaccttgtgggacggcctgaaaaatattgagctttggatcgctgctgccggacaggttttcctgagcctttccgtaggaacggggctgattctgacgtatgccagctatgtcaggaagaaagaggatatcgcgctgagcggcttttcggccgccgcctccaatgaagtgtgcgaggtgggcatcgccggcatgatgacggttcctgccgccgtggcgttcctgggagtggccggagccgccgggcaggggaccttcgcgctgggcttcatggtgctcccgcaggcttttgccaaaatggggtccagcgtggtattcggcagcctgtttttcctgcttctgacggtggcggcggtgaccagctccatttccatgatgcaggtgggcctgtcctttattgaggaattcatggggctgaaacgcaaaatggctgtggtggtgcagggcttttttacggctacgggcacgtttatcgttgcctggtacagcggcaatctgctggcgatggatacttatgatttttttctgggcacgctgtgcttctttgtgagcgccatggtgatgatgattcttttttcctggaaactgggggtggaccggggattgaaggatctggaggacagttccgtcatccgcattcccagaatttaccgtttcatcatgaagtttgtgacgcctacgttgctgctggctattttcctggcctggctggcccagaatatctgggtgaagcaggccgcgcccattgaagcgctggggcggggggaacatggggcggtcattcccatggggtttctggcggcttatgccctgtttctgcttttcatcaccatggcgtccggaaggcataaggtgtaccacggtccgcgataggcgcggaaaggactgcgcggatgcccgtttcccgcagtctgcggcaagttgggaggcaatccggaggcttgaccggagccggatttgatataggctgaaatcatgtccagaataaggaggatacgcaggaaaaagccccgtaccggcagcgtctggaaaaaactgctgttgtggggcgtgctggggctgcttgttctggctgctgctgcggtggcggggtcttatctgtatgtcagggcctacttgaagagcgatggttttttagccatgctggaacagtccgccgttgatgatatgaatgtggagacagccaggatagatccccttgactgggacggttccggcatccggtgcggcggcgtagtaatggaggggcatgagtttttgacttcccttcaggccaggaatattgagacggaattcagccgctgggaattgctgaagcgcgcttttgtcattacctccgtcaatattgcggagctgaagcttcatctcgctcccgtgtctttccgtttcagggaaaagccggaagggcccaggagctgggcggaagagaatattcttccggatacgttccgtctggaaaaggggagcattgattccctgtccgtttcctatggggaggccggccggctgtatgttttggacggggcccgcgtggagagcgcctatgacgccggttccagccagtacaggtttgatgtgcgcgggggaaagctgcttcttcctttccagggatgcccggagttttccctgatgtccggtacagcgcagtttaaccattccagcagaagggtgaacattccgtcctgccgcctgactacggatgccggcggttatttggacattaagggggactgggacggctcttcctcctcctggacggcgaatgtggtggtgaacggtgtccctgtctcttccatcctggaagaccattggagaaagcatgtccatggcagcgtgagcggcggaatagacctgcgcggcggacgggacggcgtaacccatgtggccggacttgccaggttgcagggcggcatgctgaccggccttcccgttttagaccggctggctctgttctgcggttcttccagatttcggaatcttcccctgcacgaggcgtccgcccagttcgtctatcaggaatccgcctggcatatttccaatattctggtggaaagtgaaaacctggtgagggtggaaggctggctggaaatcgggaaagggggggcgctgaccggaaggctgcaggtggggctgcgggccgacggcctgtggaaagctcttccgggtttttccgatgtgttttccgtttcccgccagggagcgggaggcaatctggcatgggccaatgtgaatatcggagggacgctggacaacccgtcggaggacttgtccgcgcggctcatcaaggcggcgggaaaccgcctgacggaaataggaatgggcaaggcggctgaagtggcggatgtcgcggcgcggctgctgaacaggggaaccgagaaaaacggagcgggggatggtgcggaacataatggccgcaagttcaggattcccgccgcggacgaagttcccgccccggttgtgccacagctgcaggacgctgcggaaaaggggcttaaaacagggaatgacctgatgaacgaattaatgaattggtaacccgttttttgcagatgaaaacttatccctgccaaatggtgcaggcggtcgccgttatcgtggagcgtatcgcggatacggctttccgcgccacccttccgaatggcaaaaccgctgtggcttttgtagaaaaaaagaacgcttccctgagggagctgctcaagccgggcgaccgggtgaacgtgacgatttgcccggcggattttgaccgcgcccgaatagacggcatggcggaatgaggcggtgagtttttcccttcatcattgggggaaagaggcatcgcgcgaggcaggaaaaccgctgtaaaacggaactgtccccatgacgggattccggacggtgaagaacgggggcatgggcgggaatttccccgtgccgggatggatgcgggaagggctttcctttacagccgggtgcgtccttccagagccttcatcagcgtcagcgtgtccgcgtggctgaggccggagccggcaggcagcccctgggcagggcgggatatcctgcaatccatttctttgagcagatggtggaggtaggtggccgttgcctccccttccacgtcagagcctgttgccagaatgacttcgcaatcaggctgccgggagacgcgttccatcagggattgaatgttgagatcttccggctccacatcatccagaggggaaagcttgccgcccaggcagtggtacaatccgcggtaggcgctgctgcgttcaatggggatgacgtccgtggcctgttccaccacgcagatgaggcggctgtcccgttcttcatcccggcaggcgacgcagggttccccttccgtgctgaagaagccgcagacggggcagggcgtgacgtgttccgccgcctggccgatggtgcgggcaatcgcctccgcttctcccatgtgcccctggagcatccacagggccatgcgttccgcgccgcgggtgccgatgcccggaagctgtttcagggcggttaccagttcaagcacggggatgggatagtccagattattcatgagcggaaggaggttcggaatgacgccggacaggaggcgtttggggacagaggatggcgagcacgcccgcgctccctgcggaaagcaggcatgggacggcattgaagaaaagaccccacagccccagcaccggggtaaagctggccagaagaaggaggaaaacggccagaacggccgttttgcggagcgtgccgcggatgagcagcaaatcgtaaacgagggccagcgtcaacgccatgcacagcaggaatcccgtgccgggagaaagggcgggggcgtccgggggaagcagaaacggggcggaggccatggcttccttcagctcccgggcccagacgggagtaaggcccaggtaatagagcgccacgagcaggctaagcccggctacggagaacagggcccagcgcatgagcagaatgtcctggtgcgttttggcgggcatggcttttaaatgaaaaaagcggaagcgcgatggctgcggtggccgcaaacatcagcgcttccgccggaaaggagaggcctgaaatggtcaggcgaatcgtttcacgatgacggaggagttatgccccccgaagccgaaggaattgctcaagacggcgtccaccctggtttcacgggccttattgggcacgcagtccaggtcgcattccggatcctggttgtccacgttgatggtgggcgggatgatgttgtcctgcatggccatcaggcaggcggccagttccacgcctcccgcggcgcccaggaggtggccggtcatggatttggtggagctgataagcagcccgtttttagcgtggtcgccgaaaacggccttgatggccttgatttcgcagatgtcgcccagcggggtggaggtgccgtgtgtgttgacgtagtcaatgtcttccggcttcattcccgcgtgttccagagccatcttcatgcagcgggcggcgccgcggccttccgggtccggggcggtgaggtggtaggcgtccgcggagatgccgtagccgacgagttccccgtaaatttttgcgccgcgcttttgggcgtgttccagcgtttccagaatgacaacgccggcgccttcgcccatgacgaagccgtcgcggtccacgtcgtacgggcgggaggcccgctggggctcgtcattgcgggagctgagggccttcatgttgctgaacccggccacgcccgtgggcaggatggtagcttccgctccgccgcagaccataacgtcggcatccccgaatttcatgatgcgccaggcttccccgatgttgtggttggaggtggcgcaggccgtgacgatggacatgttcggaccgccgaggccgtattccatggagatgaggccggaggcaatgttgctgatcatgtacgggatcatgaagggggacacgcgggcaggccctttggaaagaagcgtggcatgctggctttccagcgtgccgaggccgccgatgccgctgcccaccatgacgccgatgcgggttttgtcctccgcttccagatccagcccggaatccttgagagccattccggcagcgcccatggcaaagtgcgtgaagcggtccacgcggcgggcgtccttgggcgtcttgaagtacggggcgggatcgaaatccttgacttcaccggcgattttcgtggagtagccggtaacatccatggatttgatggtgtcaatgccgctgcggccagccttcatggcttcccaggtggatgcgagatcattgcccagggggctgatcactccgatgccggtgataacaattctgcggtcggtcataataagtgtgagtggttgcaaataatgcttgaaccagaataggcgacattgcgggaaagtcaagctaatcccccctgtttcccggcacgggggaaacaggttgggcggaaaagcgtatcctgcttacggcaaggattttgcgggtcaaggatattccctgttgcctgctgaggctccggggccgtgaacagatttcagggtaaattccgccgcggcggccgcatccggcagcgcacggaagggcggccggatatttttccctgccgcgcgcctttaacggggggcatccgccgctatcggaagaggggctgcccggaattccagggaaagggaattgacgcagtagcgcagattcttcggagtcaggcgttctccattgaaaatgtgtcccagatggcctccgcagcgggcgcatgtgatttccgtgcgccgcccgccgcccgcatggacgcttgtgacggcgtccggcagggaatcatcaaaacagggccagccgcatccggcatcgaatttgtcttccgaccggaacagaggcgcaccgcatttgcggcaggaatagatgcccggctcaaagaagctgacgaattccccggaaaagggcggttccgttccctggtgttcgataatgcgtttttccgtttccgtgagggggcggcgcgtgcgggcagggccgggatcgggtacgtcccgggaggcgggaatccctccattcacggccatgactccagccacgccttccgcaatcatgcctatccatgacgcccagtgtctccgttcttcctgatccatatggcttatgaccaggttggagcgggttttgctcattcctgaaacaatatcttgtggatattaccgtttttaaggggggagtcctgaaaatatggcagtctatggaagagttaatactccagctccagccagagctgttcccagatgccctgccgctgttcttcctggggatgggagacggacagccccagaaggcggaatgtacggtccccggaatccagttcttccatcagggtgcgggccagggggaggattccttctttctccgtcaggatttccggaacggtcgcgcagcgggtcttctggacaaagtccgggaacttaaccttcagggtaagggtgtttccccggaagccggaacgggccagccgccccgcgagttcttccgccagcagggggaggcgttgttccagcgcttccgccctggtgacgttttcccggtaggtttcttcacaacccacggatttgcgcatgcgggaaggttccacagggcggtcgtccacaccgcgggcgaagttgtagaagatggctcctgttttgccgaaatgccttatcaggaattctttgtcccgtgcccggagctgcgccccgttggtgatggaaagggcgcgcatgcgttcggcggtggcgtgcccgactccccagaaagcttcaatgggaagtgccgcgatgaatttttccgcccgggatggatggatcgtgaacagcccgtccggcttgcggtaatcggaagcgatttttgccaggaatttattgtaggaaacgccggcggaggccgtcaggtgaagttcccgtcggatttccttcttaatcctcctcgcaatgtcgacggcgagcggaatgcccggcttgttttccgtgacgtccagaaaggcttcatccagggaaaggggttccaccagatctgtgtaacggtggaaaatggcgtgtatctgcgcggagacggccttgtacacatccatgcggttgcgggtgaaaatcagatgggggcaaagcttgagagccttcatggaaggcatggcggaacgcactccgaaacggcgcgcctcgtaactggccgccgccaccacgccgcgcatttccggcctgcctacggcgatgggcttgccgcggtattcgggatggtcccgctgttctatggatgcgtaaaaggcatccatatccacatggatgatttttctctggttcatgggggcgcttcatgattcctgatggggcgggaaacatgagggaatgggatgccccatcataatccggcttatcctgcaagtccagttggaaggagaagttccggcggggaggtgaaagaaaggcggatttttggggaacgggacgatttaagtgaaaaaatcttccgggcatggtaaattccgggcatgtccagcggaatgaaggaacgcctgtgccggagcctggaaaaggtgctgcatgcggaaacccgcgaattgcctgccgtagcggggggaatcctcctgtttttcctgttgttcctggcctattccatgttgcggccggtccgggagacgatgggcattgccggaggcgttcagaatctgcagtggctttttacggctactttcgccgcttccatagggggccagtttttattcggatgggtttcctcaaaggtgcggagaaaggccattcttccgtggacgtacggttttttcattcttaacctggcggttttcgcggcgctcgtgctggcatgcccgggaaatgtctggacggcccgttcgttttatgtgtggctgtccgtatttaacctgcttaccgtttccgtggcgtggagcgtgctgtcggacgtcatgaagccggggcagatgaaacgcctgtttgccctggttgccagcggaagcagccttggggccatggcggggccggcggtgacggccgcccttgccggagtggccggccttttgtggctgttccttgccgccgctgtttttctggcgctggcgatgctggcgggaatgtacctgcaccgctggcgtgacgggaattccccggaagatgcggaaacgggagttcgtcttccggccgattgccgggaacgccctctgggagggaacccgtttgccggggcgtctgccgtattccggtctcccttcctgatgggcatcgggctgttcatcatcctgctggccgggaccaatacgttcctgtattttgagctgatgagcgttgtagcgtcttcctttcctgatccggtgcgccagacgcaggtattcggagtgctggacgttgttgttcaggggtgtaccatgctgcttcaggtatttctggcgggacgcattgttcggaaattcggattggcggcgctgctggcggttgtccccgttcttatttccctgggttttgtatggatggctttcgctccggtatttgccgtcgtggccgtggtgatggcggtacgccgcatcggggaatacggaatggtgcgtcccggccgtgaaatgttgaattccgtattgtccccggaagaaaaatataaagccaagagctttattgatacggtcctttaccgtggcggcgacgccgtcagcgcatggctgaaaagctcctttaacgtgttgggtgcccattccccgtgggccatgctggccggagccgccatttcctttctttgggcggccaccggattcctgcttgcggacaggttccggaaaatggccggagtacagggaaagaaatgatccttatggcggggaattttccgttttgtccggatacggcccgccagatgcggcaattcctggtgatgcctcttttccggcggctgccgccgttagaggtgaactgctgggatgctggggaatctggcgcgttttgaaaaagcgtggcaaagccgtgttctgtggaggaataagtgccaggccttccgttgagggatagttgcaggcaagggattgcgtgatgcccttgatggcggaagcggcgggaggcaagacagatgtttttctccggcgatgaataatttctggaatgttctttatttgacggcggtttccctctgcggcggcaacatgcggattttcaatccggaatcaatactaaatattgtggaaaaataatttaagtatcattgcaaccctgttttcaggatgatttttcctccaaaaaaactccctgccgtggcgggcacttcctgttgtttttttggaaacaattttgacactaatatcacatcttaacaaaatgtaatatttttaatataaaaaagttactttaaaaataaagattaatttctccatgccgcaagacatctgccacatgcaaccctccatccactccggcacatgaaacggattgaaaatccgttattgaagcccaagcctctgtgaggcaagtatgctggtcatctttccgttagatgattccgtcattactattgttatatattcctctgataatgaagaagacactcattacgctcattgctctggcgggaatggctcatgccgattttgtatggaacggcggtgagagcattacccaggagctttggcagacagaatccagctggtccatcaccggttcagattcctggccgtcggcaggaaccggtcccggcacgcccaattccaacgcatggtctcttatttccgtttccggtgcgaacggcagcatttcccagctggaaggctggacattgaagcttgccctgcaaaacggtgcggatttgactgtagggaacataaaaaaattccagggcggctgttctattgatattgatcaatcatctacgctgaccttcaacagttataacggcggcaatgatggtgggcgcacgacgttgaacaactacggcacctttaacctggcttataccaagagccagggcggggaaggattttacgccaatttgggagccacgggcatcatgaaccttacttcctccaacggtagttcatataccgccaagatagcaagtctgaccgctacgctgactcttgacggaggcaccgccagtggatttactgagagcgggcatcaaatcctgaccaggaacctggttaccctgggaagcaatatgtcttttgacagcacggacacttccctggaaatgctcagcggcattgcaggcattgatacccttactgctgtggacgatttgactaatgccgaagtaggttcttatatggttaccaagaatgagaacgggtacagcgtttcctatgtggttcccgaacccgcagcggcttccctgagcctgctgggcctggctggtctggcgatgcgccgccgccgcaagtaacggcaaacttggattcctgtttccattcagctcccttccgcgattaacggaagggagttttttattatttcccggaaaggcggcgtatttccggaagatgtccgggcggaacgggagagagaagccgggagagtgcatatgcatgggcctatttttccccggaggatgccgtaaccggattagccccggctattgttctgcaacgctgcaagagaggaaaggggcctgttattgccgggagtaaccactttctttcaaaaaaagtggtaggcccggtaggaatcgaacctacatcgtcggtaccggaaaccgatgtcctatccattgaacgacgagcccatgttcccaaggaacgagagaaatagaatagaaaaaacgggccggatgcaagtatttttatgccggtgacgggattggcatgatgaaaatgtggaacggggaagttacgggcagggaggtttccggatattccggggagaaggaagggggcatcaggagattttatgatgaaaagagaagatggctgccaggacggccgccacggtaacggccatgatggccgcgaaaagcggccagagatccaggaatccggctccttccagaaagatgcgctggatgagttccaggccgtatctcatgggattgagcagcgtgaggtcctggaagatttccggcatgctggagatgggcgtggcaaagccggagagcatgaccatgggcaccagcagcaggaaagttcccacaatagcctgctgaagggattgggcgaaggaggaaatgcacagcccgatggccgccgccgtgacgatgaagagcagcagggcggcggaaagcagccagatggagccctggaaggggatgcggaaccagaacatggctaccagcaccacgaagacggcctgcatgattccagtgacgacggaggctgtccccttaccgagcaggatttcccccggggtgtatggggcgacgagaagctggtcgaaggtgccttcctcccgttcgcgggcgatggagagcgcgccggagaggatggagttgatgagcgcgagcacggcgatgaggccgggaacgatgaaccagcgggtgatgaggttggggttgaaccatgcgcgggattctatttccaccggggaggatccgccgttttgggagagcagatccgccccgtaggcggaggcgatttgctggccgtagctgagggcgatggccgccgtgttcgtgttgcgcccgtccgcaatgagctggagggaggcgggcctccccgtctgaatgttgcgggagaagtccggggggatggtgagccccacgacgatttcccggttgtcgatcatgcggtcaatatccttttccgtggccgccgtggcctgcctctggaagatgcccgtgccttccaggtccgcgatgtactgagaggccgcttctccgccgtccttgtccagcacggcgtacggcacgcgggtgacgttcatggtggcggcatagccgaagatggctatctggatgatgggcgggatgatgagggccagccggctttttttgtccctgagcacggccagcagttcttttctgacgagggaggctattctgacgagaaagtccatggcgttattcgagggatttgggggctttcagccgggcgatgcccatgagcgccacggcaaagacgcccagcgtgatgcagcaggggatgatgacggaggggatatccccggccaggaagagggtctggagcagggtgacgtaatagcgggccgggatgatgcaggtgatggcccggacggcggggggcatgttgaggatgtcatacaggaagccggagagcatgagcgccggcatgaaggtgcccatgatggcgaactggcaggccaggaactggtttttggcggcggtggagatgaccagccccagccccagagccacaatcaggaataatgcggagaccgccagcagcagcgtgagggagccgcggatgggaatgccgaagacgaaggcggcgaaaatcatggagatggccaggctgaccatgcccagcaggaagttggtggcggccttggccgccaggatttccccgctgcccacgggcgtgacgaagaggctttccagcgtgccccgttcatattcccgtgccatgaccagggaggtgaggagcgccccgatcatggtcatgatggtgacgatgacgccggggaccaggtagtagtggctgtcgttggcttcattgaagcgggcgcgcgtctgcacgttcagcacgggggcggcctgaccgttcagggaggctgcccaggacgccacgacggcctgaaggtagttgcggatgagggttgcctgattggcgttgacgccgttgactacaatctggactttcgtgattccatggtgaagcgtgtccggcgcgtcgctttgcagggcgatgaaggcgtccgcctcatgggtgcgcagcttttcttccgcctcccgggtggagaagacgcgtgaggtctggaagtatctggaaagggtgagccgcgtttccaggtccgtggactggctggaggcggggacggccaggtacgcgatgcgcacgtttttgatgtccatgctcatgccgtagccgaagaggagcaggagcacggccggcaggatgaccgcgatgcctatattgccggggtcccggaccacctggtggagttccttgacgatgagggctcctattcttttgagggaggcggtcatgtttctacttctcctttcttcatgtgttcttccgtgatggccaggaaggcgtcttccagcgaggctggggctccgtcttcgcgcgggggagcgtgttttcggatgtcgtccggggagccttccgccagcgtggtcccgtccatcatgatgagcatgttatcgcagaattccgcttctcccaggaagtgcgtggtgatgatgacggtgacgcctttttccgccagggcgttgatgcgcagccagaagtcccgccgggccaggggatccgcgccggaagtgggttcatccagaaaaaggatgtccggggagtggagcagggcgcacgccatgctgaggcgctgcctgtagccgccgggcaggtgcgcggcgggggcgttcatatacggggtcaggcggaattcttcttccatggaacggatggcttcctgccgctcctttccggacatgccgtaggccccggcgaagaattccaggttttgacgcgtggtcagcatgccgtacatggagaatttctgggccacgtatcccactttcctgcgcgccctggcggcggcggtccgcagatccgccccggccaccttgagcgtgccgccgctggcgggcagcagcccgcagagcatgcggaaggtggtgcttttccccgctccgttggggcccagaaggccgaagacctgccctttgcggacggagaagctgacgtggttgacggcaatgaaactgccgaatttcctcaccaggtccgttacccggatgacggcgccgttgttttccgcctgttccggttccggcggtccggcggggacggggatgtcctgcggggagaggtccacttggccggcaagcagggtcatgaatccgtcggaaaagtccggccgcgcgggggcggggtggtattcctccagcttttcccgggcggggtggccggggggaacgatgatgcggacggtgttcccctgcggggtggcgttgatgatgccgggcacggcggccagcctgctctggaactggcgcgcatgcagcccttccggcgtgcgcaccgtgacgcacatgccttccgcacgggcgatgacgtcggagggcggagcgtccatgagcaggcgcccttcatacatgatgagggttctgttgcagtaggcggattcgtccatgtaggaggtgctgaccagcacacccacgccttcctctcctgagaattgcttcaggatgctccacagttcccgccgggaaagaggatccacgcccacggtgggttcgtccagcaggataaggggcggggaggagaccagggaacagcacaggcccagtttttgtttcatgccgccggagagctttcccgcaagccgcgtggtgaagcgttccaggctggtcatggagagcaggctgcggaagcgtttttccctgtcctgtccgtaaacgccgtgcatgcgggcgtaaagctccatgttttcccggacggtaaggtcttcataaagcccgaatttctgcggcatgtagcctatggaggcctggatggaccggctttttttcacggagtccagattcaggacggagatagacccgccatgcggtttcatcaatcccgtgatgaggcggatcagagtggtttttcccgctccgtccggccccagcagccctacgatttccccggcggacaggcggaaggagacgtcgtccaccgccgcaaatgggacgccggcggagtccggaaatattttccggacgttccggcagtcaatcaggggctgggattccgtggtcatggcctgggctgttccggggtctgtgttccggcgttctggtccagggggatggtgacggtggcgggggctcccaggcgcagccggttgtccggatcgtccacaatgatgcgcacttcatagaccagtgccgttctgagatctggcgtttccacgtttttaggggtgaattccgctacggaggagataaaccccaccgtccctttgaagccggtgtccgggaagctgtcattgcgcacggtggcggaaaagccgggctttactttgccgagctgggattccgtgaggtaggcccgcacccatttggtatggttcagggagatgttgtaaacgggtttctgcggggaggccatgtcccccttttccagaatgcggttgcgcaccacgccgttgccgggggcatagagcacggcgtctttcaggttctgctccctgatggtcaggctggctttggcctggttgtactgggccagcgcctgggctacgtcttcctcacgggaaccggccagcagcagttccagctgttttctggctacgtccagattggcggcggccacttgccgggaggcgacggcgtcgtccgcctcctggcgggagatggattttgttgcagccagcgcctccagccttttgctgcgcattccggcgttgttcagcgtagcttccgcggcctgaacgtttgccctcgcctgggctatttcttccgcgcgcgggccgtttttaacgcgcaggtagttttggcgggcggcttccgctatctgccgggcttcgtccgcggcctgccggagccgcaccgtttccagcgtggcgagcttctggccgggaacaaccgtgtccccttcgtccaccagcacggagtcaatacgttcggagatgaggaaagccagatccacctggcgcaggtccacattgccgtaaagaacggctttgtcctcgggcccggacggagttttccggtagatgagccagacggccgttcctgccgccgcaaggagaaccaggaggataaccagctttttcatagttttatttatacgtgtgtataatttattgcaagtaaaaatggagcccgcatgacggagaaggaattagcgatttactaacggagggagaacaggcataatccggcgtcttttacttttcccattatctgttatgatgaccgccaccgagatacgccaaagctttctggactttttccgcgaaaaacagcacacggtcgtgccttccgcttctttgatgccccagagccccggtttgttgtttacaaatgccggcatgaatcagtttgtcccgtatttcctgggcgtatggactcccccgtggacgcccgcccgcgctacggatacccagaagtgcatccgcgcaggcggcaagcacaatgacctggaggatgtggggtatgactcctaccaccacacgttttttgaaatgctggggaactggtccttcggggattatttcaagaaggaagctatccgctgggcctgggagctggtcgtggagcggtggggatttccggcggaacgcctgtacgccaccgtgtacgcgccggacaagagcaagggcgaccccggagagtttgaccgggaagcctgggatttctgggctgagctgttccgttcccgagggctggacccggacgtgcatatcgtgcacgggaatgtgaaggataatttctggatgatgggggaaaccggcccctgcggcccctgttccgagctgcacgtggacctgaccccggaggggaatacgaagggaagcctggtaaacaaggattccgaccagtgcatagagatatggaacctggtgtttatccaatacaatgcggagagcgacggctccatgcgcaatcttccggcatgtcatgtggataccgggatggggtttgagcgcgcgtgctccatcatgcagtgcacgaacggattcaaggatttttcccgcaaaccgtccaattacgccacggatgtattccgccccctgtttgaccgcctggaagttttgagcggacggaagtacgcggacgtgtatccggcgcccggttccaaaagggtggatgcggaggacggaacccttcaggaggcgattgccttccgcgtgattgccgatcatctgcgcacgctcagtttttccattgcggacggcattctgccgggcaacaatggccgtaattacgtgctgcgccgcattctgcgccgtgccgtgcgctatgggcgccgcctgggctttacccagccgtttttggcggaactggtggatacgctggtggagtccttcggacaggtgttcccggaactggccgcccgcgccgctaccgtgaaggaggttttgaaccgtgaagaggccagttttaatgagacgctggaccgcggcctggaattgtttgacgcggaaacggcttccgccggaaaggtgagcggcgagttcgccttcaagctgtatgatacgtacgggttccccattgacctgaccgccctgctggcggaggaacgcggcctggatattgatatggagcggttcaacaggctgatggaggaacagcgggaacgcgcccgggccgcccgcaagagcgaggtggtgcgcgccctggatttgaagacggacgccgtgacggaatttacgggatacgatgtggacgaatgcgccgctacggtgctggaagtgagccgccagggggattccctgttcatcatcacggacaagactccgttttacgcggaaatgggcgggcaggtatccgatgccggtttgattgaaatcggcggggaaagctaccatgtgatggccgtccagcagatagggaatgcccgagcccatgtggtggaggcccgtcccgggctggaggtgaggcccggcgaccgcgtgcatttgagcattgacgcggaacgccgccgccgcattgaggcgcatcacaccgccacgcatcttcttcactgcgccctgcatcaggtggtcagcccggatgcggcccagcaggggtcctttgtttcggaagaccggctgcgctttgactttaacagcagcgccgtttctccggatcagctccgcctgattgaagagaaagtgaacggctggattgaggagtctcttcccgtgcactgcacggaacgcgcctatgcggacgtgaagggcaatgccgcgattgcccagttcttcggcgacaagtacggggatgtggtgcgcgtggtccaggtgggcggatgcagggatgggctggacggggtttccatggaattctgcggcggaactcatattgccaatacgaagaatatcggcctgttcaagattaagagcgagggtgccatcgcttccggcgtgcgccgcattgaggcgatgactggggacgctgctctggaaatgatacggcagcatgttgttgccaagagcctggaaatcgccaaggcggtggagaagatcaaggaagtcaattacgagttggcggacatggggctggaacaggtgcctgtccccacgattgaaggcaagccggggctgacggccctgggggcttccgatatccggacggtaaatgattccctggcgcgtttcgacgcctccgtggagcatttcaaacagacggctctggatgcggagaagaagcttaaaaaagcccgcgccgggcagtccgccgccaaggcagacgccctgctgaatgagtggctttccgatgccccctcttccctgatccaggtggcggagggcgccggggaattgcttcaggagctgctgaacgggttgaaaaagcgccagtatgcgggcgccgccttcctgttgtgcgtggacagttcttccttgctcctgggcgcttattgtggcaaagatgccattgcggacggattgtccgccggagatatgatccgcgaggttgccgctcttgccggaggcaagggaggcggtcgtgcggaccaggcccgcggttccgctccgcaggatgccgatcctcaggccctggctgccgccgcccgcaatattattaacggataaaccccttacctgggccctatcggacaccaatcatggacaagaagattttcccggacgaacctgagattcccattttgcctaatttgtttacggcagggaacctggtgtgcggttttttcgccattctgacgatttttgagggaatcaaccaggcggacagcgacgctgtggctgctttttcctattatcagaatgccacttttttaatcttcgcggcatgtttgtttgacttgtttgacggtcgtattgcccgcatgcgcgggcaggacggcccgttcgggcgggaattcgattctctggcggatattgtctccttcggcattgccccggcgctgctggtagccaaggccgtcctgttccagctgtcccctccggaggtgggttggggcatcggcatcctgtatctgctgtgcgccgcgctgcgcctggcgcggtttaattgcatggcggccgctccccggaaggaaggccagagcagcgattttgtgggtctgcccgttccgatggcggcgggagccgtggtctccaccatgtacctggtgatgtatctggcgggcagggctccggacggggccatggacctgggcgtcttcaaatacgtgattgcgctggcaatggcgggagtctccattctgatgatgagccgggtggtctatcccagcttcaagcatatcaacatgcgcacgcgggggacgatgtacgcgattgtgttcatcgtgctggcggtcatctgcattttcaaattcccgtgggtgatgcccgcagtcattttttccatttatctgctttacgggctggtgcggccctgggtggcccgccgctggcggaacaggctggaagcccgcgatggagaataggaagacttttagaaaactgttcctgcctcttctttgaacagaccatgctgcgccggattgatgccgggcggcggtgtttccgcggcccggttccgggaatgtccctgggtccggcttttttaagggcgggaacgcagccctccctttcaggaccgtccgcaattttcctgcgcggagcgtgcgccggaacggccgggggataaagattcggcgtcccgaggaaagacggagaaggagggaaggggaggaatcgtcccgaaggaccggagcttatttgtttttctttttaaaatcgtccgcgaaggggtctttttccggggcggtgggcacggcgtgcgtttcaatgtccttggtactcttgaccagcgtgatgcatacgggcttgctgcggttgcccatggcgtcataagtgtaaaggaagcggcgcacgagttccttggtgcgggaatcgaacatttgctcttctctcaggttggcgttgccgtcgtagccgtaacgcacgaaaaagagttcgtttttctgcccgtcaaagatcaggcaggagcgcagctctccaaaaggccctcttttgtacagggttacggaaacgaggacattgcggatgttgtaagtggtttttttcatcccttttccgtcccctgttttttcaaagtagctgcgggaaccgtcttcatgtttgaccatgcgggaagaagcggtctggacattgaaatcgtcctggccggcggccagggctccggacgtcatgagcagggggatgaagagaagcaggggcgttgttttcatggtgaaaaaagagtttctgacttattaaagtgatgtatagtggctttgacaagaacgtaattagatgaactggcttgtaaggagagacgtattggatgtggcgcgcggaggcgtgctgatgggaattgtgaacgttactccggattccttttccgacggagggcgtttttatgcgacggaacgcgctgtctcccatgcaaaagagcttgaacggcagggagcccttattctggacatagggggggagtccaccaggccgggggccgcggaggttgccgcggaggaggagttggacagggtgctgcctgtggtgcgggaactccgttcatgcacggatgccgtgatttccgtggacacgcgccatgccgccgtagcggcggctgtgctggaagcgggtgcggacgttattaatgatatttccggattgcgggaggcggggatggcggaattgtgcgctgcggcgcgctgcggcgtggtggcgatgcacatgcagggacggcctgaaaccatgcaggacgctccttcttatggggatgtggtgcgggaagtgcgcggctattttgaggaacgttatgattttctgctggggcgggggctggaaccggagcagatctgctgggatcccggcatcggctttggcaaaacggcggaacacaatctggccctgctgtccaacatggacaagcttcaggtggcaggccgcccggtgctgctgggcctttcccgcaagcgcatgctgggcgccgtcctgggggatgcggagcagggacgcgcgccgctgagcaccgccgtgatgacggtgtgggggcatttgcacggcgcgcagattcaccgtgtccatgacgtggcggaatgcgcccgcgccctccggctgatccgggccgctgaaccgtttgtccgctgattgagccatggaatccgcttcttcccgtccggtattgacatccctggcgtccattgcattttccctggcggtggtgttcctttttctggcggtacgggggatctggcctttcggaggccgcttcctggagtatatggataacgggcagctggtttatcctaccttgaagtattatgcctccgccctgatgtccggagcgtttgacggagcttttttttatgatgtcaatggcggcgcgggaatccgggtgagccctacgctgccgcatcagctgctgatcccctccacctggattgccgtggcgatgggggattccttcctgttgaaggacatggtctgggtgatgctggcggatgtggcctgcatctgcgtgacggcttcctggttcctgagacgcgtgtttccctccctgcccgtatgctggaccgtgctgctgacggcgggttatgccgtggggggctttttccagaccaagtacgggttcatgcagttcctggaccatgccgccatgttccccctgtttgccctgggcctttaccggctggtgaacgggggaaggggctggctgtatgccgccggcctcttcctgctggctacctccctgtacagcgctttcatggccgtcgtcactggctggatgttcgcgtgggcctttacgctgcccctgaaggggacgcgggaacgccgcgtgcgcctggcccgcgtgttctggtacacggcggcggtaacgctggccacttgttattactggctgccgatggcggaaatgagccgggattccatgcgttccctgtttatgacgccgcccacgttttttgaattgtcatggccgtttgaccctcccaaattcctggaacgcctttacgcctgtttgccggggatgtcatttgccgctctggcggcggtttatctggcttgcgggaagaaggcgtccccggcgccggacagagggaggcgcctgtttatccttcttctggcggcgtccgttttgcccgcgtttgtcgagcccatccaccgcgccgcccatttatggagctacgtggattttcccgtccggttcggttttattcccaatctggcggtaatgtcgttctgcgcctggattttgtccggcggcaggcttccggggccggcaggacggccatgggggtggggatggagcctggggcttcccatagcggcttttttcttttccctgtttgtcctgaagatgacggctgcggatcttgcggtgcgtcttctgcctttgctgttttttgcatgcgcatggctgtgctggaggcatgtggagggcaaaaggctggcgtggtccatcgcttccgtgatgatgctggggctgcccataggggctgccgcgttctggaagcagggggaggaggagaaagcctccgtccaggcgctcaatgcggaatggctggcgcgcggcatgaaggggtattcaggcttgctgcgcgtgaaggacagggatcgcctgatggtggaaaacgcggattgcctggggcctgtcccgggcattggcaatttccggcatacgacgagcatcgggcatttccgttttctgaaaaacctggggtaccgggatgaattcacgcgcacgtacggccagggaggcactctgttttccgatttgctgctgggccatggttttgtgctggcgtcccggtccatggagggaatggagtgcgtgctttcccgggaaggcctgtatttatacaggcttccgggtgcccgctgggggctggtagttccccagggcgcgctggggttgcgtctggatgggaacgctgatgtgttcagcaatcttaatgccctgcacgccgcgctctgcccatcggcggaaggccccctttatgaggccgtaacagtgaggacggagatgagcggccccttttaccgcgcggacattccggaatatcccggcgcggtgtacgggttcccgcagacggatacggcggaactccgtgtcaatggatgtgcggtgcccgtcatggcggaggcgcagaagacatccggaggaacgagccgcacctataacggggttttggaattgaagcgtgcggccgttgccggggaaaccgtggtggaggggaggatgctgcggaccgtggagacgccccttctggcggctgcggcgcgtacgccggagcaggatgttccggttctggggaaagagcaggataagtacggaatggaggcgaaaggaagcggtggccatgtggaggtggcgctgaatgccggggaaggggaggctctcatggtgccggtcgtgtatgaccggggatggagagtccggcggaacgggatggaggcgcctgtggaaaaggtgggggaattgatggcggtgcgccttctgaaagggcaaaaccgggtggtgtttgattattatccgcctttattgaaaggttccctgctgttttcctccggcgcggccgccgtcttcctgctgtatgcatggtgggcgcggcggcatccggaatcctcgctcaggaggattgttctggcctgcggatacaggctgtttcagtgctgcgccgccgtggtgctggcggctgtttatatggggtcaatcgtgttgtttatcgtgcagtccgtgctgtgaaggaatccccggaaggcagggaaataggccagggactgagtgcggggggatgctggcgtggaacaatatccgcggggcgtagccgtttcctttttgccggtggccggattggcgggaaaaggctttccgttttgaaggatggttgacaggggaatctggcgcggtagagtggtttcatgcagtcttcctattgtccgagtccttatcgatatacgcgccgcgtaacccgtgaagtcatggtggggaatgtgggggtgggcggttccaatcccatccggatccagtccatgctgacgtccgatacgcgggatacggatgcctgcgtgaaggaggctttggagctggcggaggcagggtgcgagattatccgcctgaccgcccagaccaaggcgtatgccgccaatttggagaatattgcccgggaattgcgcgctgccggctgccatgtgcctctggtggccgatatccacttcaagccggatgccgcgatggaggctgccaaatgggtggagaagattcgtattaatccgggcaatttcgttgataagaagaagtttgaagtgcgggagtattccgacgccgaataccgcgaggagctggaccgcctgagggaagaatttacgcccctggttctgttttgccgagagcatggccgcgcgatgcgcatcggttccaaccatggctccctgtccgaccgcattctgaaccgctttggcgatacgccggaggggatggtggagagcgcgattgagtttgcccagattgcccgcgacctggattaccattccctggtgttttccatgaaggcttccaacgtcaaggtgatggtggccgcttaccgattgctggtggagcgcatgaacgccctggggccggattggaattatcccattcatctgggggtgacggaagccgggggcggagaggacggccgcatcaagagcgccgtgggcatcggctccctgctgacggacggcattggtgataccctgcgcgtttccctgacggaggacgctgtgagggaggtgcccgtggcttaccgcctgtccaatcctttccagccgtcggagcgttccgatgacccggtttccttccctgaaccggagttgagctatgatcccctgaagttttccaaaaggcagggtgggctggcgatgtgttatggcgtgcgcctgggctgggaacagcctgtgcgcgtggcggttcctgatgccgggttttacgccctgcagacggaacgggaggcgatgggggacatgatgcctgaattatccctggggcagctggatgccattgaggtggatccccggtgcgatgccgatctggagccgttgaaggagctggcggaaccgtctattgtcactgtgaagaacgggctggctatggagcctgtatatgcgttccgccttctggctgcccgtattgaggacaggcacctgatcctgctgaaggatacgctggtgcccggttccgtttccggggaagacgtgccgctgacggctgcccgcaatatcggctccctgctgtgcgacgggattggagacgccgtgctgattcagggcgagtcggacccccgtttggcttctttcctgggattcaatattttgcaggctacgggaacgaggctgacgcgggcggattacgtttcctgcccgtcctgcgggcgtaccctgtacaatatccaggaggcgacggcccgcatccggaaagccacggaacatctgaaaggggtgaagattgccgtgatgggatgtattgtgaatggccccggcgagatggcggatgcggatttcggttatgtgggcggcgcaccgaacaagatcaacctgtatgtgaagcacacgcctgtgaagttcaatattccccaggaggaggctgtggaacggctggtggatctgatcaaggagtatgggcggtgggtggaccccaagtgaggttttaacgttgagggaacttttttgatgcggagagtgttcatcagcggcggtcacggcggtttggcgcgggccatcgtggaatgtttttccgctgcgggatgggagacggatgcccccagccatgccgcactggatgtgggagaccgttccgccgtacgccgctggtttgattgccatgccgcgtatgatttggcggtttgcgccgccggaattactagggacaggccgttcctgaagcagacggaggaggagtgggacgaggtaatgaatgtgaatgtgacgggagccgcctggtgcggccgatgcgccgccgccgccatggtgcgggagaagagggagggtcaggtggtgatgatcggttcttatgcggcgctccgtccggctccgtcccaggcggcttatgccgcttccaaggctgctctggcgggcctggtgaaaagcctggcgcgggaatggggaaaggatgggattcgcgtgaatctggtgttgccggggttcatgctgacggagatgacggccgtgctgcgggatagcgtgaaagaggcggctttgtcccggcatgttttgaaccggttgaatacgccggaacaggctgcggcgtttatcctgtttttacaggatgttcttacggcggcttccggccaggtgttcgatctggacagcaggattgtttaataatggacagcggatttattatccgcgttctcccctgctgatgatatatttccaagaaaatcatttttttaataaaaaagatagcctgctatgattttgaaaacaggaaatcttgaaaaacaaggtttttccggtcttttggaaagtgtgtaaacatggatagattcctctttccgtgtttggaattccatgttttcaacgggaaccgaatgtccctggtgtatcaaattttttcttaaattattcttcttcaatattaaggcttgaacgcggataataaatccgtagaaatgtttctccatgagtttgccgctggctgatgatgaagagaaaggaaagcgtttttcctgtggttgtccggaatatatttccccgtcccggaattatggaatagatgccttgcgcattgtcgccatgatgatggttttaattcttcatcttttggcctccattgatgttttgtctttggagaaccatgggtccgcttcctataatgtcgggtggctgctggagattgccgcttattgcggtgtgaattgttatgcgttaattacaggatatgtgtgctgcgacggaacgttcaggtatgaacgtgtggtttccttatggtttcaggttgttttttatacatggggcagtttgctgctggctctgttgtttttcccccaggaggttcagttgagcaatattctgcattccctttttcccgttttatccggccagtattggtatgtaacggcgtatgtggggctgtttttcttcattccgtttcttaacgccctggggaacaggctgaccaaattacagttccagtatcttctggttaccgttttcgtgctgttttccgttattcccaccctgcttcacacggatgtgttcccggtggaagaagggtatagcatctggtggctgggcatcctttacatgctggggatgtatgttaaaaagcatggcttgctgacggaaatgaaaacgcgtccgttatggatgttttatgccggattcgtatgttttgcctgggttttcaagatggttcttaacgtggtgtctccatacctgattgggcagatcaagggcggtggaatgtttattcgctataattctccttttattgtagggacggcggttgccctgttgctgattttttcccggatgcatttttcatcccgaagggctgtctcctgtatttcatggctggcggcagcgtcgttcagcgtttatgtgctgcattgtaatgctttgataggaaaatggtttttgtgggatgtctttgagtgggcagcgtcttcttcctcagccctgatggttgtgaacgtgttggcaatagccgccgtggtttatgccggatgcgccttggtggactccgtgcggcgttatttatttaagctcatgaacgtggaaaggggcgcccgggcggtgacgggcttttgcggaaagctggggcatgcattccggaagatgtgccgccggatagattcgcatccctaaggatgagggaatgtcctgttccggcggttccgggcggtttttgtctggagctaggctagtttttattatcgcttttatccaggagggttttaagccagggaatgaccaggtcttttttgaagaaatggttgcgcgggtccacattggcgaaacggaaaaaggcgtccctgtccagacctgcgggcaattggctgccgtgccagcgttgggcagggtccgcaaaccggggctggtgatggtactggaaatgatccggcgccccggccatacggtaggctgcggagatgagctggaagtccctgtccaggccgccttccgtgcaaatgacagggcgcggagcgagagccgccacgatgtccgggaagtcgaattgtttccagaagcccggaatgaggtggcggatggagttgggagcggaacgcacgcccctgccgttgggcatggtcatggttttggcgcgttccagcgtgcggcacagaaagtcgttatacacgaaggcaaagatatccgggttcaggctgcccagaaccatcatgggttccgttcccagggagaagccgctgaggataatatggtttttttgcgcccaggggcgtgttttcacccaatccagaatacattggtccgcgtaggaggtgtagcccagccagctccagtccatttccagcaggaagcgggccaggttttcataatcgtgtgaagaacggcctgcggcgtgttccgcgtctccttcttcacccgttccggcattgtccaccacaatggccgcccatccctgcctgacataatggaaagccatggcgttgttgcccggctgctgtacggaaggctggtccagatccggtgatgtttcccccgccagctcttccttggtctggtctgacccgggaatgcagaatagcacgggaaccggatttttgtctgaagcgttgttcggcaggagcaccaggaacggtacggcggctcccgggaagggataggcttcccatttttccacccggtagtgttctcttggcacggtttttaccagaacgggggcggggatatccgcctggggggggaatttcatcagttgttgcatggctttccggactttttcccgccaggcggggaaatccttcggagccatatccggggaaaattcgcatgccggacgcagtttttccagcatggtctggacgataccccgggaggaaacatgccgctggtcgctccgggatgaatgaagcaccgcccagtctgccgcccggaatttttcactgggcggggtaagggagaaggagggaagagaaagggatgccaatagaagagagaaaaaaacggcgggctgaatagtcatgaagccagattgccataaaagaagcttccattgcaaggttgcagcggtggtcttttcaggttgttcctgacgcatcggaagcttgagtttttccgggcagggcggtagtctggccgccgtcatgatggcggggggtaagagtcttggaagcccggaaccgcgggtatgcggcctgggcctggcttccggcttcggcatgggggcggcagtccatcttgccggggtaagggaagggcgcagagtgttgaagccgttgagcgaattgtggggcgaaggtaatccctggggcgatgtattgagcggatggattccagacagggaattgttatgcagccgcaggaacggccctgcttcccagctggcgctgctgttggcgcgccaggccgtggaggacgccggatggggaaggaaggaattgagggatgccgccctgattgtgggcagttcccgcgggaatgcttccggatggctgagcccgtggccgggacggcggcccatgaaaattttggccgttcccaattccctgcatagcgaacttgcttcctgcgtcagcatcgaattgggaatttgcgggccttatcacgtgctggcgagcggctgtgccgccggcctggatgccgtaggcatggccgccatgctgatgcggcagggagttgttaagagagcgctggctatcggtctggatttgcctttgtgccgggagctgctggggacgtactgggcctccggcatgctttcccgcaatggtttgaatgatccctacggccctctggccgacggcatgtgcatttccgagggaggggcggccatagccctggaattgtcttctgctccaggtatttatgtgaaggattatctggtgaattccgatgcctatagcccgctgggcatgccggaggacggaaagagcatagccgccctgctggaggctgctttgaaaagtcgggatggagcggttcctctgaccgtttgtccccatgccagcggcacggcggggaatagcatgtccgaacgggctgctttgaaaagggtttttaaagacggactgccggatttgaggatgatgaagccgtggacggggcatgccattggaggcagcggaattttggaactggccctgatgctggtctttgccagggagggggtattgcctcccaatcctccctgggccaccttcccggaaggcggcgcctgttctgcggaggagctgccgttggccggggggcggatgctggtcaaatccgccgcttccatgggcggccataatgtggtgctgagtctggctgtggacggttgaatattgttgaatagtgaacgcttatgaagaatcctgaacagtttttgtcagagttgaagtctgcggggctgctgcgcgtcctgcgggatgtggaatgcctgcccggaggaatggcccgtctggcggatggccggaaagtggtcaatctggcaagcaacgattatctggggctggcccaccatccgtccctggcggaggctttttcccgtgcggtgcgggatgaaggggccggagccatggcatcccgcctggtgacggggacgcggcgggaacattcctgtctggaagaggccctggccgctttgaaggggactgaagcggcggtcagtttttcctccggttatgctacctccctgggagtgattgcttctattgcggaccgggaggatacggtgctgatggataagttgtcccatgccagcctgattgacggggcgcgtttgtccggggcgcgtttgtctacgttcctgcataacgatatggagtcattaaggaaaaaactgcagcatttgcgggacgcgaatccttccggcgggattctggtagtgaccgaatccgttttcagcatggatggagaccgtgccccccttcgggaaattgtgcgtctgaaggatgaattcggcgcgttgctgctggtggatgaagctcacggattcggtgtgctgggagaacacggggccggactggcggaagagctgggtgtttcctcccggatagattttcaaatggggactttgagcaaggctgccggggtaagtggtggatatgtggcctgttcccgcgcctgggcggatgtaatggttaattccgcccggtccctgatttattccacggctccgcctcccgctttggccgccgccgccctggccgcggtggaagtgatccgcagcggggagggaaaggaattgcgccgccgtgtttccgtgctggcaaacagtttgtccgccgcactggggatgtcgggaaggcctctttcttccattttccctgttgtggtgggagagaacgatgctgccctggctgcggcggatgccctgctggaacagggctttctggctcccgccatccgttatcctacggttccccgcggaacggcccggttgcgcattacggtaacggctgcgcatgaatccgggcaggtcacgcggctggggacggcgttgaaggagctgctgcatgggaagtaacgcaggcgttgtttttggttctccgcattggagccggttcctgtttttatgcggggcctgccggaaatgggattatcctcattgatgccgccataaaaaaggaagaaggatatctgatgcctggcggaacggaatgacatccggatgtcctgaatggcagagcttgcatcttgacagggaagttttcttccagtaaggggaaagaatgaaggttcccaaaggaattttcactgaaccctataaaataacgtcatgatgaatacttctgattcttcttctccttcgtcctgctgcagcggttctccttcctgcacggccgctcttgttctcggcatcatcgccctggtattggcattgatcggttttttcccgtgcctgggctggattactctgattcctgcggggctgcttgccattattgcactgatcatgagcattgtggctgtcagtaaaggttcgcccaaaggggctcttgttgttgccattatcgcgttggccctgtccgccgttgcgggaattgtccaggcatggatggccagcgctaccgtgacttacatggaacagcaccaggattatgtggaaaagaaggctctggaaattcaaaaggagcttcggcagatggagcaggaaaacagggagtcattgaggcggtccggggaggcggatggaatgtcccccgcggatggaacaggctcccaggatttgtagttcctgaacctttttaggaaaatcggcgatgaatggcgggcgctcttcatggcgttcatgccgtgatagctgggtggtcaggaaagtatggctgcctgtatgggctgttctgtcctgcctgttgctggcgccctccctcatggctctggcaattagccctgacaggatgaattctctggcggcttctgttgccgtgccgcatcgtgaatgcccgttgtgcggcatgacgcgagggtatgcggaaatggcccgcggggatatacgcgccgcatggggatggaaccgaggagctccggtcttgtttatggcaggactgctcaatggaggggctgccgcgttttatttggcatggtgctggcggagaagggcgggaagccgggaaaaggaaaatagttctcccgcgtagcaagccggcaggggaggaaccggctccccctgtccccgataaatgacacggcggaagttttgaagcagggcctgggaagttcttctgcctcctgtttattccctgtaacggggctggcgcctggtgggggggacggaatgatgttgagtttttattgaatgaattccatgccaaattcctcgtagtgccgaagatgaagttcccctgcccaggttgagcgttttgccggagggagctgcgttgttcctgaaaaggagaggggtatgcggcgccggtgtttcatgccttaggattattttttgtcaggaaggggaatagcttttctgggaacggccggtattgccgttcatgaaaggagtgttcgttgtgtggaatattttgatttttctttattccggtattttgttgataatgttgttttctattaagttgtgtaattttctaacatttttattctaggcccggttgattttatatatatagtttttggatattgtatgaatatttgcatgtccatctatagatcaatcgaattgcggaagaatacatccggaagttataaggtccggctgactatcgaccggggaagcaagttctgcggagccaggaaatctctcggtctcggcacccatcgggaggattgcgccctaagacgtgcctacctgatgcgatgcctgctgtttcatatgggatggtttcccggcggaaagattgccgtcaggaattcagccgaatgcggtatcaaggatgtggtttgggacagcatggagtgttcggaggattccggaatgttcaagcttgccggcaggggaggccgcatggctgcggatgagaccatggccatctggttccagacgaatgaagacgggaaggtccagtgcctccgtctgctcatttccggatggaggaaggatgaccgggcggatgatttgagggtgctgattcagggaatgcggcattgcgccttggaacagcgccagcatccctgccggattttgaatattgaaatcggcgccggctctttcgcggcatcccgggatgagtgtgtgctgaaaggataggaaaacggattgtcccagataccagtttatcctggttttattctgaagacgccacattccggttgggaaatccggctgtatgtccggcatgcctggcccggagtttatttggccgtcattgacgacgggaaggttgtccgtattccgggcgaggcgaaggtgcaggaggaatggtgcgctgcctgccgggaaagggagttttgtttttcctgcatgaaaaaaaaccccggatggaatgattgccatccggggggggttttagggatccggctattttttagcgggcagtttcacctgaatgtgaatgtcgcgcagctgacggtcttccgcggcggcgggggagtcgctcatcagatccgctccccggttgtttttcgggaatgcgatgacttcgcggatggattccgcgttgcaaatcatcatgaccaggcggtcaagacccagcgcaaggccgccgtggggcggagcgccgaagctgaaagcgtccagaatgtggccgaattgttcgcgggcctgttcttccgtgatgccgagcgccttgaacatggcggactgcaggtcgcgttcatggatgcggatggaaccgcctcccagctccgtgccgttgagcaccacgtcgtaggcctgcgcgcgaaggtctgcggagagttccccgctgagcagtttttgttcgtcttccttgacggggcgggtaaaggggtggtggatggcgacccagcgctgctcttcctcatcccagcccaccagcgggaattcaataacccacagaaagtcgcgttccttgttgtccttgagcagttccatgaattcggcgcattgcaggcgcacgcggcccaggatatcgcaggagggttcccacgggccggcggcaaagagaacgaggtctcctgtttcgatgtccagggcttccgtgagtttttgcttttcttcgtcggaaaggaatttggagatggggcttctccagtcttcctcgcgcaccttgatgtaggccaggcctttggctccggcttccacggcagttttcgtcagggcgtcaatctggccaacggaggcggaaccgaatcccttggcgttgatggccttgaccacgccgccgttgcttacggcggaggcgaataccttgaagccgctgttttcaaagatggaggagacgtccgtcagcttcatgccgaagcggcgttccggcttgtcggaaccgtactgatccattgcttccttccaggtcatgcgggggaagggggtgggaatgtccacgcccagggattccttgtacacgcgtttgagcaggccttccaccaggttgtagatgtcttccggcgtgatgaaggaagcttcaatgtccacctgggtgaattccggctggcggtccgcgcgcaggtcttcgtcacggaagcagcgggcaatttggaaatagcgttccatgccggctaccatgagcagctgcttgtattgctgcggggcctggggcagcgcgtagaatttgccgggcgccaggcgggagggcaccaggaagtcccgtgcgccttccggcgtggatttggagaggatgggcgtttcaatttccagaaagccgtgctcgtccagatagtcgcgcgtggctttggtgacgcggtggcggatctgcatgttgcgggccatggccgggcggcgcaggtccagaaagcggtatttgaggcgcaggtcttcgttggagagggcccgatccagctggaaggggagcacgtcagccttgttgatgacgttcagggtgtctgcggagacttcgatttccccggtggggaggtccgcattggtcgtgtccaccgtatccgttttcaggcgggcggccacggtgccggaaatctggatcatgtcttcggagcggagctgctgggaggctttcgccacatcctgattgacttccgggtgaaagactacctgcgtgatgccggagcggtcgcgcaagtcgataaatatgacgccgccatggtcccggacggaatctacccagccgatgagggtggtcggcttgccgatgttcgcagcgcgcaattcgctgcaggtatgagtgcggtatgagttcatctttattgaaaatggaagaaggggaaagaacggtgtcaattgcttccggtgagtgaagccacggcgtcaaacaggtcgtccatggcgacgggggatgaggtgcgcgcgcccaggtcgcgaagttccatgaccgggaattcatctcccacgatcaaggccgcgcgggcgccggatttgacggccttctggagctgtccgttgactttggtgagcgtgaggggaaggtccacactgtatccctggtcccggagggcggaggcgatggcaagaacttccgcgcggcggctttcagatgcctgaaccatgaagatgtcgcagcctgcggaggccagcgccgcatctttcagcgccctggcatggggcgtctgttcaataaggtgggtgatgacggcatcccccatggcaaagccggttgccggcatgtccactgcgttgttggaaagggcgcctaccagcgtgtcgtaacgtcctccgccggctacggcgcgcaggctgcgctgtgtgtcaaagatttcaaaaaccagaccggtgtagtatgccagtccgcgcactacggataagtccagcttgacatagccgtccagcccgcgggccgtcaggtctttcatcaggatgtcatagcgttcggacgctccggcgggcgggttttcaatgaaggccaccagatcgccgcggctgatatgaaaggcgtccagcttgcgctggcattcttccgggcggtcacgttcaaatttgtccacaatgccgaggaaagcgggaatatcctgttcctgcacgccgtgttccgaagcaaacctgatccaggcttcccggtcagagacgcgcacaatgaagtcgttttgcgtaaagcccagttccctcatgcagtcgatggccagggctatcagttcggaatccgtccacgcggaggcttctcccagaatgtccgcattgaattgataaaattcgcgcagacgccctttctggggtttttcataacggaagcatgagccgatttcaaaccacttgagcggtttggtgtattcgcgctggtaggcggctgcgatgcgtcccagggaggcggtgagttccgggcggatggtgatgtcccggtccccctggtccgtgaagcggaagagctgggtgggcagctcgcctccgctctttttaagataaagctccgtggcttccacagtcgggccctcccattccaggaatccgtaacgatgagccaccttcttccatgcgttgaaaagatagttgcgcacggcgcagtccgccggtgcaaaatcgcggaatccgggaagtggttgaaagcgagcgtctggcataacctggaaaaaaggatgttgtctgaggacgaaacagtttacagaattcctatgccttggcaagtccacatgcttatgatgaaggaatttcggtggaaaccatatgaatgactctatgcaggaggatggggacggttattccggttttacatgaaatgaggaagggcgggaaaggattgattattggggactttattgttttttttattatccgaattttttgcgcgggctgtggggcgtgcgggtttaagtggctggggatttgtaaacggatgtcaaacaacaatattgaacagcaaggggaaatgataagaggatgttcccaaaagtttttctgcgtatggagcattgcatctttccctttatagaaaaatgttttcctcccgcgctaaaaagaaaaccggggcagttttgtttgatttcataggagtatgacgtgaaacggatgagttttttttctctttgggaatctaatatcagtattgattatgtgtaaagaatgtggatgcgggggggagctctcccatgaaagtcacggccacggcatggacgtccatgttccggtgttggatgccaatgaccggctggcagagcgcaacagaggtttttttgctgcaaaaaaccttttggttatcaatgttttttcttctccggggtcaggaaagacttccctgttgcagaagacggcggagatgctccgcggccgtgtgcgcatgggggttatcgtaggggatttggcgacggataatgatgcggaacgcctgagccgagcggatatccccgtagtgcagattacaacgggcaccatgtgccatctggacgcccgcatgattgcggaggccatgaagaaaatgcctctggatgatctcgacgttttgattattgaaaatgtgggcaatctggtttgcccggcttcctatgacctgggggaaggcgtgcgcgtggtgctgctttccgtgacggagggtgaggacaagccgttgaaatatcctcccatgttccattctgcggatgttgccctggtgaccaagtccgatctggcggatgccgtggattttaaccgtgacgccgccctggccgccctgaacaaggtggctcatcatgcgcacgtgatggaggtttcttccaagaccggcgaaggaatggaggcctggtgcgaggagattgtggaacgtgcgcgccacgcccgggaaggcacgattcagcatcatggccatcaccaccattgaacaggccgccgcggcattgaaatttgagatagccggcatggttcagggggtcggcttccgtccccatgtgtaccgtttggcggtacggcacggattgaaggggtttgtgcgcaatacggagtccggtgtggagattcatgtggaaggggagtccggcgctccggagcgtttctggaccgcgctgatggacggcctgccggagcatgcccgggtttatggagtggagcgtaccgtatgcgagcctgccggttttgaggaattccgcattgaggaaagcgattccacccccggaggcgttccggtgatgctgccggatctggctccgtgcccggagtgcctggaagaaatgcgcgacccgttttcccgccggtatcattatccgtttaccaactgtacgcactgcggttcccgctattccattattgagacaatgccgtatgaccgcgcgggcaccagcatgaaggggttccgaatgtgtccggagtgccggagggagtaccaggatgtggaggacaggcgttttcacgcacagcctatcggctgcccgtcctgcggcccttccgtgaaggtgctgttttcagatggttccgaactggggttcggccatgggtttgatacccccgcggcacaggtggcatgggtgctggcggacggtttgattgtggccctgctgggcgtgggagggtttcaattgctggcggatgcttcttcggaagctgccgtcaggcgtctccggcggttgaaggagcgtgacgccaagccttttgccgtgatggtgccggatgtggctgcggcggagaggctgtgccgcttgtcggaggaggaaaagcgcctgctggcttctccggccgcccccattgtgctggcccggggcaggaaggatgtggatctggctccttccgtgtgcatgttcagccgttttgtggggataatgcttccgtcttcccctcttcatgcgctgctgatggatgtgtggggaaagcctctggtggtgaccagcgggaacctgagcggcgagcccctgtgcatctccgtggaggaggggctggagaaactgggccgtgtggcggatgtgtttttggtgcatgaccgcccggtagtgcggcccgtggacgattccgtggtccgcgttacggacggcagggccatgatggttcgccgcgcccgcggatatgctccgcggcctgtgtggcgcacatccgcagcggttcccgatgtgctcgccctggggtccggattgaagaataccatctgctggctgaaaaggggcgtggctgtcatgagccagcatctcggtgacctgagcagttcggcttccctgaacgcttttgagcggacggtggaggcgctgggcagaaccctggatgccgttccgcaggtaattgccgtggacgcccatccggacggccccacttttgcccttggccggcgtctggcgcagaagtggaatgcagcggttgtccctgtgcagcatcatcaggctcatgtgctggcctgtgccgtggaaaatgaaatgccgtttcctgctttgggcatcgcttgggacgggacggggttcggtacggacggaacggtatggggaggggaattttttgtgttggaggaagagggtgagccgcacagggtggcgcggctcaggccgtttcttctgcccggcggggacgaagcggttcgggaaccttcccggtgcgcctgttccctggcccgtcagatggggccgtggcgtacggaggggcttgataagcgtctggagagggggctgcctgtgcggaaacgcgaggttctggaggcgatgatggcccggaatatccattgtccgtcctcctcgtccatggggcggttgtttgatgccgtggctttctggtgcggttttgacggtgaggcggggtgtgagggccatgccgccatgatgctggaatcatgggccgcggaagtttccggggaagaaatgccgggggacgcgtatgaatgggtcatgcatgaagaagagggattgctggaactggactggaggccgttgatgaagtctgtggatgaagatttattgaaaggcgtttcccgcggctgcatcgcccgcaagtttcatgagagcctggtgaatctggtctttgacgtggcggagcgtttctgcctggacaggctggtgctgggcggcggatgttttcagaattcctttttgcttgaaggactggcgggaatggctcagtctagaaggtgccagttggctctgccccagcgggtgccgtgcaatgacgggggaatttccctggggcaggttgcggcggtcgtacgccaatggaaaggataggatatgtgtttggccgttcccggaaagattgtgagcgtcaatgagacggaccctttgttcagattgggggtggtggattttggcggcgtgacccgtgaagtgaatctggcctgtgtgccggaagccgtgccgggggattacgtcatcgttcacgtgggcatggccctgagcgtgctggacgaggaaaccgctcttcaaacccgcagggaaatgagggaaattgtggaaaaaacggatccgctgtaaaggggcgtttcccgaatttaatgaatatttatgcaggaggaagtccggcagctgattgaagaattgcgccatgctgtgacgcgtccgtgggcggtcatggaggtatgcggaggtcagacgcatgcgattgcctctctggggctggaggagctgttgcctcccggcctgcgcctgattcacggccccggctgtccggtctgcgttacggcggtggagttgattgaccaggccgtggaattaagcctgcggcccggcgtggttttgtgcagctacggggatatgatgcgggtgccgggttcccgcggggatttgttttccgccaaggccagggggggagacgtgcttttgatgtattctccgctggaagcggtcgcttatgccggaacccatcctgatacggaagtggtgttttttgccgtagggtttgagacgacggccccggctacggcgcttgccctgcagcaggcccgcgcgctggggtatgccaatttttccgttctctgcgcccatgtgcaggttcccccggctctggaatggctgatggagcaggatgagggcaggccggacgccttcctggcccccggccatgtctgcgccgtcacgggggaaatggattacgggcgtttggccacccgttaccggacgcccatggtggtgacggggtttgaggctccggacctgctccgcggcattctgatgtgcgttcgtcagctggaagccggggaatatgcagtgcggaatgcgtacggacgttatgtgaaaccctgtggaaacagggcggcgcaggaaaggatgaatgaagtttttgagccggaagaccgccattggcgcgggctggggctgattcccggcggcggcatgaggctgcgccgggagtggcgtgccatggatgccgttctgcgttttgaatgcggaacggggaggccgggtgcggatgaggtttccggatgcctggccgggcaggtgttgagggggctgattcgtcctggggaatgcccttttttcggggcgtcctgcacgccgctgactccgctgggcgctcccatggtgtccggggaaggggcatgcgccgcttattatcattataaaagaagctgataccatgtttgagtgtcctgttccggaacctgtttccgaccgtatccagatggctcacggcggcggaggccgcttgatgaatgagctgatccgttctgtgtttctgagcgccttcggttccccttccgaaggcgtgcagaatgacgccgccgtattggaggttcctccggggaggctggcgatgacgacggacagctttgtggtgcagcctttggagtttcccggcggctccatcggttcactggcggtgcacggaacggtgaatgatctcgccatgagcggcgcggagccgttgtatttgacggcgggctttattctggaagaggggcttccgctgaaggtgctgacccgcgtggcgcaggatatggctgccgcggcccgtgcggcgggcgtccgtattgtgacgggggacacaaaagtggtggagcgcggaaagggggacggtatttacattaatactgccggggttggcatcgtgcgccatggtttggagatcagcccttcttccgttcgtccgggggattccgtgctgctcagcggggatttggggaggcatggcatgacgattatgagcctgcgcgccgggctgtctttcggagacggcctggaaagtgattccgctccgttgcacgaatccgtggccgctgtcattcgtgccggcattcccgtgcattgcctgcgtgacgtgacccgcggcgggttgaccgccactcttgcggagattgcggaatctgccggcctgacagtgaagctgaatgaaatgtctattcccgtgcgtgaggatgtcagggcggcatgcggcctgctggggctggaccctcttcaagtggcctgtgaggggcgttatctggctgttcttccccgggagcatgaggaagaggccctgaacctgatgcgcggctgcggcgtatctgccggagcctgcgtcataggccatgtggaggaattggggacggcgcccctgctgatgacgggacgtcttggagtggagcgggtgttgacgatgccttcaggaatgcagcttccccgcatctgctgattcctggtgctgcattattagcgttttgtggcagggaagcggaggaacccgcttccctgccgggtccggtgtttcataggggtgccggagcggctctgtgcgcttccggaggaaagcgcagccggcttggtatggggaactggttgttgggagatggttcaggagggagtgtctttacctgtcccggcatcgggaaactcttttaatgccgctttggcctgtgcatggtcctgggaggctgccttttccagccattcccgggcagtttccaggtttttttccacgccgaatccgtacaggcagatgattcccatattgtattgctcggaggcgtagccggccctggcggcgcgaagattcctgttttgccattccctggcttccgcttccgtgaagccctggcttttgcagaattggtcccacgtctttccgaatttcatggcagccctcgcaaatcccgacagggcggattttctggtgtattcatccgccaggcgcatgttttttcccactccggcgggtcccagcctgtacaggtgggccagtccccagtatccgttggggctgcccagatctgccgctttttggaagagctgcaacgcgtccgggtattttttatgggacatggcgaataccgcattggccaggaagcgttccgctttgatgaattcgtaaaattcgggaatagccgcccattcggatttaagtttgttcctgtctttcctggatttgggaggcatgccggaaggcggggatattcggaaaacgggaatgtaaccggaagcgcccatattggccagcccggccatcagaaagcagcccggctggaggcgccacatgtgcatgtacaaaacgcgctctgctggcagagattccttctcgatccagtccggcaggttcatgggggggccgtaaagtcccgtcagtccgttcagcatgcgcttgtacagggatttcaggcgcgtatcgtattcctctttacccgctttggtggtggagtaaaaggaaacggctttcagacctccatcctttccgtactcgaaatgcagggagaagaaaaggcctccaataggttttttcgtcttgtaggctccgttcagccctgtacggctcaggtaggcgtctgtttccggcccttccagggatttgcaggttttcagggaattcagaagctgggattcctgcaaacctgtttccagggggccgtaaagaggcgaggcggcgccgcaggaagctgtataaagcacagccatgtagcgatagcaattggtcaatttcatgggatagatagggcagggatggaagtggtgcttcaatagcggattaggaattcgaatgaagtgttcaaagatgtttctatgaaaaacaaatatattacaatcaatagtttatgttttgttccaacaaatttattctgttgagggttgtgtccgggaaaatgatggatgattttggagaaatgcatttggtatgaaaaactgatattgacgtcggattcctaatccgcagtgtttaaaataggttgaaaaatgttgtttaatctttttgttatcagcatattaaaaatatgcatcctgttttcctgaagtgaaaaaggcggaaaggcgcgtctgttgtcccgccacgttcttccgtttttttacatgggaatcgttattatttttattaaaagtctttctgaatattcattcatttccgttttgtgtatcccatatgcatgcattgtggcggatttcaaatccgcctgtcagcgaaaaaaggagttgatttttacttattaattttattatcaatggataaaagaaatgttggggattgtttctttcaggatgcgttgtgatttttttctttctctatacgatgaaagtccttttttctcaaaaaatttgattgactgcggatttgaaatgcgcagatgaacgcgcatggattgagagcgtttgatattcaacgggctgtttcttttttgcagcaatacgcagttttggaagatggcctgatagaaaaaagagggctcatgatacgtacccgtacgggaaaaacgggaaggccgtggcggaattgctccggagcggctgttgattctgccggggctgcgagcataaccggatgtttgtgacggtttcgtttccggctgcatcttgtttgaggaagccattccgctcatggtaccggtacatgagaattgatgtggtaacggacacgtatgaacctgatgtaaatggagtggccctgacgctggggcgtctggtcggcggcctccggatgcgcgggcatctggtgcatgtgatgagggcttctgaacggaacggctctttcaaccctggggagacggctatgccgtcccttcccctccccatgtaccatgaggtgaagatagggctgccttctgcagacaggttccgcgccagatggatgaaaaaaaggccggatgtggtatacgtggctacggaaagccccatgggagcgtctgccgtgaaggtcgcccgtacgctggaggttcccgtggtgatgggattccataccaatttccaccagtatatgaaggattaccatttctccagactggaaacagccgccgtgaattacctgcgcaaactccacaacagggcagggatgacagtggttcccacggaggaaatgcgccgtacgctggaagggctggggtttgaacgcctttccgtcatggggcgcggagtggatgccgtcctgtttgatcccgccaggagggatgcttccctgcgccagtcatggggcgtctggcgggatgaagtggtatttggcgtcgtggggcgtctggcgcgggaaaagaacctggtggcggccctggggctgtacacgcgcttgcagagggagtttccggattgcggcatgaaaatggtggtggtaggggacggccccatgatgaacagcctgcgcagtgagtttcctgatgccgttttttgcggaatgcgccgtggggaagacctggcgcgccattatgccgccatggacgttttactgttcgccagtgagacggaaactttcgggaacgttttgctggaaggcatggccagtggtttggctacggtcagctaccggtatgccgcttccgcggatgtggtgctggacggcatcaacggccttcaggcggagaaaggggatgaagaggggttttattccgccatgcgccgtctgctggaagacggggagatgattcggaggcttgggaaacaggcccgcaggacggtgaattccagaacttgggattccatccatgacaggtttgaagaactgctggcttccgtggcccgggaggaaaacgggaccggctgcgcccgccccccgcgggatgccgtgctggaatgccgcacggtttttttgtcggaccttcatctgggaacgaaagactgcaaggcggacgaatgccggaagtttctgaaacatgtccgggctggaaaaattgtgctggtgggggatattgtggatgcttgggctttgtcccgcggcagccgctggcggcggaggcatacgcgctttgtccgcaccttgttgaaaaagatggaacaggaggatgtggaagtcctgtacctgcgcggaaaccacgatgatattctggaaaaattcctgccttttcatctgggcggtttgaaaattgccagggagtacgtgcaccaggctgtggatggaagacgctacctgtgcgtgcatggagacggttttgacgccatttccaccaatcaccggtggctggcgatgctcggctctctgggttatgacgttttgctgatggtcaacaggttttacaacaaataccgcgcctggcggggcagggaatattattccgtttcccgcgccatcaagggccgcgtgaaatccgccgtcaattttatcggaaaatatgaggaacagcttcaacgcctggcggtaaagaggcagtgtgacggcatcatcgccgggcatgtgcatcatccggcggataccatggtgggaaaggtgagatatctgaattgcggggactgggtggaaaccatgagcgcagtgctggaatacggcgacggccgtatggaaacggtgctttacaaggattttatgaagcgcctggcatatggcaaatgcggaaccatggaggatgcggaaacttctcccggcacgggggattcatgacggaacggcctttatccggttccccccggaagtgggacaaaatgactttgtgtgacattttgtctcttttctggtgtgacattatgtcccgtttccttttgtcgggaaaatagaggaatgaaaggaaaaacagcataatatgattataatatgacatttgcgtttatttttcagtatgccttgccaggttggcatgccatttgcaacaaaagaggcaagaatatgagtttgcctgcatgatgcttcaggtcatgaggaaatcaaatctcaacgaaatccattcaaaacaatctaaaataacgatatggctaaaatattaggaatcgaccttggcacgaccaactcgtgcatggctgtgatggaaggcggtcagggtaccgtacttgaaaacagcgaaggtgcgcgcaccactccctccattgttgctttcaccaaaagcggtgaacgcctcgtggggcaggccgccaaacgtcaggcggtaaccaacccgaaaaacaccgtgttttcctccaagcgcctcatcggtcgcaagtacagtgaactgacggaagaagataaaaaggtgccgtacgaaattgtggaagctcccaacggagatgcctacatccgcgtggatgtgggcggtgaaaagaagaccttttctccccaggaaatcgcttccatggtgctggccaagctgaaagccgatgcggaatccaaacttggcgaaacgattacggaggccgtgattaccgtccccgcctatttcaatgacgcccagcgcaacgcgaccaaggccgccggtgaaatcgcaggccttaaagtgcgccgcattatcaatgaaccgacggcggcggccctggcctacggcttggacaaaaagtccaatgaaaacattgccgtatatgacctcggcggcggcacctttgatatttccgtgctggaaatcggcgacggagtgtttgaggtgaaggcttccgacggcgacacccacttgggcggcgatgactgggacaacgcaatcatcaactggattataggcgagttcaagaaagactccggcatggatctttccaaccagcctgacgccattcagcgcatcaaggaagaagcggaaaaggccaagatcgccctttcctccacccagagctatgacatcagcctgccgttcatcacggcggacgcttccggccccaagcatatccagctgacgctgagccgtcccaagctggaacagctcacggaagacctgctggaccgcacccgcaagcctgtgctggactgcattgccgcgtccgggctgaaaaccggagacattgacgagctggtgctggtgggcggcatgacccgcatgcccgccgttcaggaaatggcccatacgctggccggcaaggaaccgcacaagggcgtgaacccggatgaagtggtggccctgggcgccgccattcagggcggcgtgcttcagggggacgtgaacgacgtgcttctgctggacgtgactccgctgaccttgtccattgaaacgatgggcggcatcgccactccgatgatcgaacgcaacacgaccatcccggtgcgcaagagccaggtgttctccaccgccgccgacaaccagcccgccgtggacatccgcgtttgccagggcgaacgcaagatgtttgaggataacaagctcctcggcaacttcaagctggacggcatttctcccgctccgcgcggcataccgcagatcgaagtgacctttgacattgacgccaacggcattctgcacgtatccgccaaggacaagggcaccggcaaggagcagaaaatttccatccagggctccagcggcctttccaaggatgaaattgagcgcgccaagcgtgacgctgaagcccacgcggaagaagacaagaaacgcgctgaggaaattgacaccattaatcaggctgactccctctgcttctccgtggagcgccagcttaaggatatgggggacaagctgcccccggaactcaagcgcgaaattgaagacaaggtaacgcgtctcaaggaagccgtctccaagaaagacatcacggcgatcaaggctggcaaggaagacctggaatcccgcctggaagccctgtacaaagcggcggaagccgcccagcagtctgccggggccgccggccccatgccgggcgccgctcccgaagaggaatcttccgacggtccccgcaaggcgaagggccgcgtggtggacgccgaaatcgtggacgacgacaaataagcaatccccttcccgccggagtgggaagcgattccccctccggcggaacattacatcccgtattattcatctacaacaacattaaaacaacatactatggcaaacatcaaacccctaggacaacgtgtgctggtcaagcgcattgaagctgaaaccaagacggccggcggcctgttcctgccggacaccgccaaggaaaaaccccaggaagccgaagtgatctccgtaggcaccggcggccgcgatgaaaaaggcgccctgattgaattcaccgtgaagcccggagaccgcgtgcttatttccaagtacggcggcacggaaatcaaactggacggagaagactaccttatcctgtctgaaaatgatattctggccatcatcggctaaacggcaccgcacacacactcaacatcattttaaatattaatattatggctaaacaaatccaatttgacgaaaccgcccgccaggctctgctccgcggcgtggaacagattgccaaggctgtcaagagcacgctgggccctgccggccgcaacgtagtgatcgacaagaaattcggttcccccctcatcaccaaggacggcgtaaccgtggccaaggaaattgaactggaagacccgtttgaaaacatgggcgcccagcttgtccgggaagtctcttccaaaaccaatgatgtagccggggacggcaccactaccgctaccgtgctggctgaaagcatttaccgcgaaggcctgcgcaacgtcactgccggagccaaccccatctccctccagaggggcatcatgaaggctgcggattccgttgtggaagaactcaagaaaatcagcaagcctgttgactccagcaaggaagtggcccaggtcgctaccgtctccgccaactgggacgctgaaatcggcaacatcatcgcggaagccatggacaaggtgggcaaggacggcaccatcaccgtggaagaagccaagggcattgaaaccacgttggacgtggtggaaggcatgcagtttgacaagggatacctgtccccctacttcgtgactaacgcggaaacgatggaagcggtgctggaaaacccctacatcctcatccacgaaaagaaaatcaacaacctgaaggacttccttccgcttctcgaaaaagtggccaagagcggccgtcccttcctggtaatcgcggaagacattgaaggcgaagctctcgccaccctggtggtcaaccgtctgcgcggcgtgctgaacatctgcgcggtcaaggctcccggcttcggcgaccgccgcaaggccatgatggaagacatcgccatccttaccggcggcaagtgcatcacggaagacctgggcatcaagctggaaaacgtgggcattgaagacctcggccaggccaagcgcgtggttgtttccaaggatgaaaccgttatcgtggaaggttccggcaaatcttccgacattgaagcccgcatttcccagattcgccgccagatcaaggacaccacgtccgactacgaccgcgaaaaactccaggaacgcctggccaagctggccggcggcgtggccgtcattcatgtgggcgccgcgacggaaacggaaatgaaggaaaagaaggcccgtgtggacgacgccctgcacgctacccgcgctgcggtggaagaaggcattgttcccggcggcggcgtggcgctgattcgcgcccagaaggccattgacaccctcaaactggaaggtgatgaagcaacgggcgcccagatcgtttatcgcgctgtggaagccccgctccgccagctggcctgcaatgccggccgtgaaggagccctcatcgtcgccaacgtgaaaggcatgaagaatactgccgaaggttacaacgtggccacggacaagtatgaagacctgctttccgccggcgtggtggatccgaccaaggtgacccgttccgctctgcagaatgcggcttccatcgccggtctgctgcttaccacggaatgcgtcatcgccgacaagcccgagaagaagagctgcggttgcggctctggagcttccgacatgggcggcatgggaggaatgggcggcatgggcatgatgtaagccccgtccgtttctttgaaacaaggcaatcggcttcaaggctccccggttttccggggagccttttttatattgcttcatcaggagacggtttcaggaaagaggctgcgcagaatgtccggggaatggaagaatattgaatgatgacaggaaatatctgtctaatcattacatgacgaagttatataagaatatattgtttgcggccgcggcattggtcatgccttccgcactggccgatatcccggagtcttccgttccggctgccgccgtttccagtatcaagggagcttatccgaacgccggtttcattgaatgggactctgaaatgcatggcttgaaaaagatttacgaagccgaattcaaaattaacggattccagtttgacgtgaagattgcccctgatgggaaaattgtgcggattaaggaagaaatggctgtttcctctcttccggaagccgttcgttcgtccgttttgaagcgttatccggggtgccggattaaggaagcgaaaaaaattactgaaggagaacttgtccgttacaaggtggaagtggaggacagccgtgatgattatgatgtgctgattgcccctgacggaaatatccttcatgtggatcgttaggctttttgttttttacatttaatgaaagcgggaggagagcggatgagtccgctctcctctttttttgaggccggggaagtgtgtggaaaatgtaacgaaatgttcacgttttaaaacgggcgtgcggaagcgtcctcctgtaataaaggggcgtttattacgcatatggacccaatctattacttgatcataggattgatactggcgttatcctgcttcgacctcgttgtcggagtttccaatgacgccgccaactttctgaactccgccgtcggttccaaggccgctccgcgcaggacaattgtgctggtggccgctgtgggcatcatcatcggctcgttgttctccagcggcatgatggaaatagccagaagcggcgtattcatgccggcccggttttctttccatgacatcatgctgatcttcctggcggtcatgttgacggatgtcatcctgctggacgttttcaacacgttcggccttcccacttccactacggtttccattgtttttgaacttctgggcggcgccgtggctgcggccctctttaaaatctggtccggggaaccgggcgttgcgcaggaattgtccggctacattaattcttccaaagctctggcaatcatctccggcattttttcctccgtttttattgctttcatctgcgggataacggttatgtggatttcccgcctcattttctccttcaactatcaaaagtccttcaactatctgggagccgtctggtgcggcgtggccctgacggctatcacctactttgccattttcaaggggctgaagggaagcacgctggtcaccaaggatatgatccgccatctggacgaccatatctggctgtacgtttgctgcagcctggcattctggaccgttctgatggccgtgctccagaatctttgcaaagtcaatatcctgaaagtatccgttctcgcgggcaccatggccctggccctttcctttgccgggaatgacctggtcaacttcatcggcgtttttatggcggggcagtcttccatggaaattgcggccgccgccgcagcgcagggggcggaccttaccactctgtccatgggcggtctgatggcccccgtcacggcggattggcgttacctgctgggggcgggcgtcatcatggtgctggctctcatgttctccaaaaaggcgcaaaccgttacggatacggaagtcaatctggcgaggcagggcgggggagtagagcggttcggctccgtccccccggcccgcatggcggtgcgctatgccctgaatgcttcccgcgcagtggaaaaaatcatgccctcctgcgtcgggagatttattgaaaaacgcttccggcctgtgccggaagggccggataacggtgcatctttcgacctcattcgcgcttccgtgaatttgacggtggctgccctgctgatttctttggccacgtcccttcggcttcccctttccaccacgtatgtgacgttcatggtggcgatgggttcctccctggcggacaaggcctgggggcgggacagcgccgtgtatcgcatcaccggagtgattacggtgatttcagggtggttctttacggcctttgccgcgttttccatgtgcttcattgtggcggcctgcatcctttatggcggtctcttcggcatcatctccatgtgttctctggcggctttcctgcttctgaaaagttccaggctccatcgcaaaagaacccaggctgcagctcaggcgcaggccgccaattaccgggacccggctgccgccgcacgctacaatgaggaaattattgaactgatgaagcgcatggcggaaatctatgaaatgaatctggaggccctgaacgtggaggaccggaagcgtctgaaaaaactccggaaagaagcgcgcggcatccgccgttccctgagcgataaaatggcgatggaagtcatgcccgtcgtccgtgaactcccggacaaagaggccgaccgaggcaagcgctatgtgcagatggtggaatacgctacctccgtctttgaatccctctccaacattactacggccagccatgcctatatagacaacaaccatgaagggctggatttggaaaggatagagcttctgcggggaatgaacagccgtgtttcttccctctacccccgtttccgggaaatgatggaaagcaatgactataccgggctggacgaatgcctggcaggcatggacgccctggatgaggaatttgcggaagccgtcaaacagcagattattctgcgtccggaagacgcctccgatatgcgacgggcgcttctctatctcaacctccttaatgaaacccgggcgatgatccgcaaagtgcttcttcttgctaaaatccagaggaaatttgttcttggctggtagcctctccctgtaattcacgtccgtgccggcggcgaatgcttccggcacggacgtattgcccggactgttcccgtattgggagaggctgccaggtcttttttattcacacggaacaaggcttctttgcggataaatcatgtcttctgcctgtgggacaatgtcttgaaaggccgtttccaggcgttgccatgtatgttgccgtctcaagaaaacaaaaacgcaagctttgataaacaataacttgcggaacaaactggtacgggcgatgggaatcgaacccacgtctcaagcttgggaagctcgcgtcctaccattgaacgacgcccgcatgaaatgcggatgcctatttagcggcagaagacccggatgtcaagaccacagaaaaaacgtatcctcttttttgttattttgacgcagtaatgaaaaaaaacttgtcttattccgtgatttgaacataatgcgttcgttgcgcgggtatagcttaatggtaaagctccagccttccaagctgattatacgggttcgattcccgttacccgctccatttttttattaaattcacttgctaaatacttcctttatgaaagccaggttcgtgacaaaggcggcgcttagtgcgctggcacttgcgtttgcgggtacccttcccggtgtggctcagcaaactgctgctccggctgttgattcggttaaagcctccgctgttgaaaaggtttttattgtgaaaatggcggatattgttcaggccggattgaaggccggtgctctggatgtgaaagcagtgtccggagttttgaatgaggcggttaaggctgacgtttctgaccgtgtgatgggggcgatggtgtccatggctgcgggggctttcccttccagcgctcctgccgttgcttccgccgctgttcggagttacggatccaatataagggaggggcatgtgcgcaatgtgatcgcttccgctgtttcttcccagtctaacccgtatgcgtccgtggctcccatttcggaagcggttgaaaaggttctgggtaattctccggtagccgctgctgtttcttccattgctgtggatgtggcagctcagacccctgacaatcctctctccggggaaactgttcaaggttctggtctggcaagtcctgacgaaggtatttctgaggggagtttggttctgccgggcggtcttcctgtgggcggcacgcccaccagccctgctcccgtgtccaatcctgctggcaattaacctgattcttatttaataaatagcatgaagagtctttttatctctccctggttggccgccggcatgtttgccgtccatgccaacgggcagtctctgtacacgctggcgggtccggtgggtctggaagagtcccttcctctcaagtggttcttcaacctggcgggagggtatgacgacaatgtcaacgcctccaattataacaagcaggaatccgcgttcatcagtacggacatagggtgctccctggccaactacgatgccgtgacccagtattctttctccgccaagctggggggtattttttacctgaaagaccttgatggcggaacgaatgaagccctttccaattccacgctgtccgccaaactttcccatagttttgaccagacgttgcgttataacggcagcgtctccttcgcatggcagccggaacccaactattccaacggtattgccaatgcccgccgggacggcgactacatttacgtgtatgtttccagttccgtgagcaaggcgtggacttcccgctattccacgacgctgggcgccaatttctccatgatcgactatcaggaggattccgccaagacggataaccgcgattatgttggcatgaatttcaccaaccggtacaaatggacggaacgtctggctgtttccctgggctggacgggatcctactgtaatcgcgaatacggcaataacgaattttccaacttcgtcatggccggcgctgaatacgcggtgagcgaaaatacctccgccacgctgcgcgtaggtccgcagttcaagtatgtcgagaattacggaacaaaaacctatccttccgcggaattcggcttaaaccaccgcttgagcgaccggttcatgctcggaacgttcgtccgttattccaacgaagcggtgaatacctacattccttacaacggcgccagctattattccaatgaaacatggcgtttcggggtacacagcacgctgaagctgacgcaccgcgtcagtctgaattgcggagtaaacctggttgccagcgattatacgcgtccgagttccatcagcaacagtgacacgtccaacctgactttcaatgctaccgccggtatcaagcttctgctgacgaatgccctggcccttacggcccaatattcttacacgaacggttcctacagcggctataactacccgatgccctcctacaaccgcaacgtgttctccttcggcgtgaattacagcttctaagtcttgactgaccattaatgcctttactcctctaattgcgaattttcattcacaattagaggagtttttatcttactgccttactatatttcatgaatgcccaggatcagcagaacagtgatcgcatcgtacgcaatattgactatttgcaggttttaaaaaatcgctggaaggaagtctttcttgttttccttctggtgctggtcatttccgtggtagtgactttcctgatgccgccctcctaccgggcgaccagccagtttcagattaaactgcccaagcctgtgatggatatcggcaggggaggggacgtggttgccacttccaacgtgacggccaactacattcccatgcagtattccgtgctgacttccgccgaagtgcttaaagtggtatccagaaaactgaaccttgccgcggaatgggggatgacggatgaaatggcggcgactaatctggccgacatgatcaaggtggcccccgtgcgcgccacggaccttgtggacgtcattgtttccggtccggaccccaaactggtgcagaatatcgccaaggcagtgcctgaggcgtacaagcaggaccgtgaaatgcgcgaaaaccgtctggtggaaaccgccatcaagagcctgaaggatgtccttcgggaacaggaggatgccgtcaatgaaaaaatgatggctctcaaaaagctgattgcggagagttcctacctgcccacgtcctggaggaacggtgaacaccgcagcaccctgacggccggtatggaagaagaggaattccggaatgccaaggcgcaggccatggattttgaaaggagggaaaaggaactggcttcctatgtgcaggaattgcagcgtctgcccgacgacaagttgctggattacgtgatcagttccgacctgctgaatgcggagactgtgggtgcggacgctctccgtaagacctatgctgaattttccgacaagctcaaggaaaaggaaaatctgaaatcccagaacatcggcgccaggcatcccaaaatgctggcattgctggaaacggaaagaattctgggggataagctgaacaaggaattgataggcctgcgttcttccctgaagagcaagctggaaatggttgccgcgagccggaagcactgggaggctaccgtcgcccaaaaagaggaagatcttcagaagcacgtcctgcaggttcccatgtatgaacaggccagccgtgattatgacgctgcgctggaccagcttaaggaactggactcccgatacaaggatgagattgcccgtttgcgcgtgccccgtgaggcgattgaaatgtatcagctgccgacctaccctgttgcgccctacaagccgaatgtgactattaacctggcggtgggagcgggcgccggtctgttgctgggcatcgggttggccctgcttctggaattcatggatacctccgtgaaaaccatggaagacgtggaacgggctcttcaggttcccgtactgggcattattcccaagaatgtgccgattctgcattcatccgatgccatggggccggatgcggaagcctaccgcattttgcggacgaacatagaattcaacaagaaaggcctggaggaaatttcgctgacctttgtttccggcagcgccggggaagggaagaccaccactctgtgcaacctggcctatatttgcgcccagggggggtatgccaccctgatgattgacgccgacctgcgccgttccaggcttcaccggtattatgagctggataatgaggtagggctgacttcctacctgctggaagattatcctctggaggaagtcatttttcagacgcccattgaaaacctgtacgtcatgcccgcggggcctactccctttgacccttcaggcgccttgaattcccgcaagtttaatgaattgctgcaggaagtgaagcaacgttttgacattgtgctggtggattccccgcccattctgggggtcagtgactccgccgtcattgtaagcgaggtggatatgactcttatggttgtccagccccgcaagctgccgctgaaagccctgttgaggcagaagcaggtaattgagtccgtgggcggtaatctggccggtgtggtgatgaataatgtggacattacgtccgatcaccagtatcagtattacacaacttactattcctactattctgcggatggctcttcctccggcgagaatgcggatgcctcctccatgaagaaggtggaacgttctggaaaggccaaggagctggcagccacccagtcccatgatagtgaagatttgtattaacccatggctccatgaaaaaatatatttgttccatcctttgtcttatgctgggcccggcggggctgggctccgcccagtctccggatgccgtgccgccccagggcaccattgaaatccaggtgcgcggcattccttccgacgacgctaccgctatttccgggcagtatctgttggacgggaacggtacgatacgcatgccccagctccctccggggcaggatgtactgcgcgtggtaggcaaaacggcccgccagattgaagacatgctgatggccgcctacaagaaggcggagctgtacacggcccctacgtttctggtgaaggtgcagagttcggatgcgcggctgacggaacacatcgttctggtaagcggcggtgtagctatgaagaagaatgttttgtggcggcgcggcatgacgcttctggaggcgattgtgggcgccggcgacatcacggactggggatcccgctacgtgcaggtgacgcgcggtggaaaaaccgtgacgtatgattatttttccattaaagacagggcgattcccatccagcccaatgaccgcattttcgttcctcagcgcgggatttttgaagggcgcccgccaaaacttcttccctgaggcatttttcccatacccggctttccgcaaggaagccgggttttttattgggccggttttcatgatgggggaaatatcggaaaaaacgcggatggggaaacggggggcggagtgaaggggcgtgtcgtcagcggttggtgaaaccggggggcttctcatgatcccttcttcaggcttcttgccggaaatgaatgttttcggggaagccgtatggtggaatcgcgcagggaaagaagttgtcttttgaaagtttgcggcatcggaaaggaacgcctggaaaaaggggggaaatttgtttccagcccctcttgtttatgggaatggaaggcttgagatccggaaaagattaagggggataagtttcccgatgggcgcgtaggcccttttcacattattggccggcatggtctccgggcatatattgcggagaaatgagtttagtatgaatgtaaaaaacagaaaaacaaagaaaaatgttgaacattcttaaactcaatgcatttttggaatctccaaaatatgttagagtttcgtgcggaacggctgcatgaggcttcgtaaatccaatgtgaaaacccgttaatcatgatataccgttttaagaaaacattcatcggcgtgggagggcgtgaatatatcagcaaccccaaattgagtttccctgaacatgtcaaaatccgccgccgcggaacgaatcccaggtccggccagccttacacggaggcgggtagcgcatttgtggagacatccgccgtcgcggcacggctctgctgcagtgcttccgccgcgcgccagtatctgcaccgccacggtgtccgtttccgggtggtccgcaagggtacgggccccctggccctgtactggcggcggctggatgtggagcgggttcttgctggaagggagcccgtgcgccgccgcgtgcctccgtgttatatggatatggccggggctgtcagcatgctgggagtagtgcgcagctatgtttacaggctggtgaaaaaagggctgctgcgtgaatacaggtgcaggatgaaaacagcccgtggactgcgcgtgcgctgcttttaccaccgggaggatctggaacatgtcaggctgcacgtgctccagaaaagatgacggaagcggttccggaggatgcgtttttggcttgcgcgcgggccggattgtgtcacgttaagggtatgatagcttttctgcgcggcacggtggcggaatcatatccccagcggttgatcctggatgttcatggggtggggtatgaagtgattgtgcccctgtccacgtttgacaggctgaatccccttcccggcagagagctgacgctgaaaacctacctgcatgtccgggagaacatgcaggtgctgtacggttttgccacggatgcggaaagggatattttcctgctgctgattgaacgtgtttccggaatcggcccggcaacggcgattgccattttgggttccctgtccgtggagcagttcaagcaggcggttgtgggcggagatgtttccggcattgctcgggccaagggggtgggcaagaagacggcggaacgcatcgtcctggaactgaaggataaagtgggcctggccgccacgtgggaagcccaggcccagggcgctacttcccaggccgccggggacgcggaattggcgctgattgcgctcgggttcaagcaggtggaatcccgcaaggcgatagccgcccatctgaaggaccatccggatgcagacgtggacgagctgatacgcgccgctttgcgttccatgaattgaaggagcttccggaggaaggaaggtgtttttgcaagtttttgattttcatgagggaacatgtccgcttggcggagtgttccctgtttgcggaagctgggggaacatactgccatgatgggggaacaatagtgttgacggctggttgaaacgtttttaaacttgcagcgtccatggtacttgaataagtccgggactagtaattaatcaaatctgaagccctcaatcttatggccaaatacgctattaacggttttggacgcattggtcgcaacgtactgcgcgccatgtccaaggaagaacgcaacaaggttgttgccatcaatgacctgactcctatcgaaacgatcgcccacctgctcaagtatgactccacgcagggcaagtttgacggtgaaatttccatcgagggtgattatctggtcgttgacggtcacaagatcctcatcaccgtggaacgtgatcccgccaaccttccctggaaggatctgggcgtggacgtcgttctggaatccaccggcctgttcaccaagcgcgacgccgccaagaagcaccttgacgccggcgccaagaaggttcttatttccgctccctccccggatccggacctgactttcgttctgggcatcaacgacagcgaatacgatcctgccaagcacgatatcgtttccaacgcttcctgcaccaccaactgccttgctccgatggtgaaggtgctggacgacaagttcggcgttgaaaagggcatgatgagcacgattcactcctacacgaacgatcagcgcattctggaccttccgcacaaggatccccgccgtgcccgcgccgccgcgatcaacatcattccgacgaccaccggcgccgccaaggccattggtgaagtaatgccgaacctgaagggttccctgaacggcgcttccttccgcgttccgactccgaccggttccctaaccgactttgtggccgtgctcaagaaggatgtgaccgtggaagaagtaaacgccgccatgaaggaagccgctgaaggcccgctgaagggcattctggcttactccgaagaagcgctcgttcttcaggacatcgtttccgacccccactcctgcatctttgactccggcttcacgtatgtggtcggcggcaacctggtgaaggtctgcggctggtacgacaacgaatggggttactccaaccgcgccgcccaggccatgaagaagctgggcgacagcctgggctgcggatgctcctgcggcaagtaagttctttcggacaacgcttgctcttcagttgcacgacaagtcttgccgtccgcctgtttcaattttccggctttcctggccggttttgccgggcgggcggggatttatccgggagggcagaaatgccctccctttttattcattgaaccaaacaatataaaccgatatggctaaacttactgttcgcgaccttgacgccaagggaaaggaagtcctcatgcgcgtggatttcaacgtccctctcaaggatggggaaattaccaatgacgcccgcattgtggctgctctccccaccatcaagttcctgctggaccagggcgcacgccttgtccttacctctcatttgggccgtcccaaaaacgaacccgatcccgctttttccctgaagcccgttgccgcccgcctttccgaattgctcggcaaggacgttaaattcgtttccgccgccattggcccggaagcggaagccgcccgcgccgccatgaaggacggtgatgtggttctgctggaaaatgtccgtttttatcctggtgaaaagaagaacgatccggagttcgccaagtccctgctgggcaatgccacgctgttcgtgaacgacgcattcggcacggcccaccgtgctcacgcttccacggaaggcgtgacgcattttgcggaaaagagcgccatgggcttcctgattgaacgtgaactggaatacctggaaggcaagctggaaaacccggaaaaaccctttgtggtgattatgggcggcgccaaggtgtccgacaagattgaagtgctttccaaactgatggagaaggctgatacgttcctgattggcggcgccatggccaatacgtttctggcggctgaagggtatgacctgggcgcttccaagattgaaggggacaagctggatctggcccgggaaattctggcggcggccaaggccaagggcgtgaaattcctgcttcctgcagatgtgcgcgtagccatgaaatttgaagacggcgccgaaaccttctgcacggctcctttcgctgaaggcggcaaggtgccggaaggcggcatggccatcgacatcggcgacaaagccattgaagagttctccgccatcatcaaggatgccaagaccgttctgtggaacggcccgatgggcgtatttgaaatggactgcttcgccaagggaaccaaggaagtcgcggaagccctggcggattccaccgccatttccatcgtaggcggcggcgattccgtgacggcggccaagaagttcaaggtgcaggataagctttccttctgttccacgggcggcggcgcttccctggaactgctggaaggcaaggttcttcccggtgtgggggccttgaccgacaagtgctgctgcggcaagtaaccgttcatggccgtgcggattgttttcgcctggcgttcagaatgggctttttcatttcccgcatccgttttcgggtgcgggatttttgatttgccggcttccgttgaaaaagcgagggagttttgcgattccggctttttgaataaggtgggaatccatgctcatgccgtctttccattccggaaaggaaggcagtcttttttttgggcttgctcttaatatgctccccggtagtctgagcataatgaaactgctgcattgttttctggctgtcctttggtggtgttctcctataccggctgcggatattcccgatgcggagaaggcggaatatggcgggtatcccgggcggtacatccttcttgattctcctcaacccgaccggcagagcctgtccactcccgtagctgcctatgtccatgacaatgggatggaagtagctctcattggtgctattcatgtggcggaaccggaatattacgaccggctgaataagctgttccgcaggtacgatgtactgctttttgaaatgattggcggagagggcctccggcgggaagaggaattgcgccgcaagatagaccgcagcaagccgctgggggggctgactctggaagaggcgcgggaatggaaccggatagtggaatggaggaagaaatgcgggcaggaggaaaagtcttttttaatggggctgctggggggcgcctacaaggagttgagcaatatgctgggactccagacccagcatcagggcattgattattccgcagcccatttcgtccatgcggacatgacgctggatgaattccgcaaggcgcaggccagaaagggtgaaagcattgccggcctgatgcttaaatccgtcttgtcctccttggttgagaaaaccgggacgaaccgggccggtgaatttggattgatggcggatttcctggccggcaataaaacggggttgaagaataagctgatgggcatgatggccaatgctcctaatggtctggagaataccgtgattctggaaggccggaacgccaagtgcatggaagtgtttgaccgttggagcggcaagggcgtgcgcaggataggcgtcttttacggagcggcgcatcttcccggcctgcacggcgctcttttggaacgcggctaccgtcttcgggaggtgcgctggcttccggcgtggagcaccagggagcagggtgcggacgggcagcgcggggagggttgagttttgttactttttccccggtttttccgggacgggcggtgtagcggcggatgaacatggttttccgccgctccgcctttgaagagggaagaagaggggggctttttccctgcctggggcaggatgccgttctttagggggcaggatgccgcgttccggagggaaccatgcggacgatacctccgcctttgatgcgcatggtgaaggaaagggcatttccggaagtgactttccgggtttccacgctccatccgtcatttttttccgccagatcccggagaatggtggcctggtatgccgtgtttttgtccaggaaattcaaaggaatggaaacggtgcgttccctgccgtctccgttcatcagagcaatgtaccactggtttcctgaccgccgggcgaaggcagcgcattccccaatggcagacggcggaaggacgatggtttcctcccatacggaagggatgttccggacaacttcccgttcaggggaatccttcgggaaagcagcttccatgtccgcagggttggagacccagtgaagcatgggggacgtgtaaatgatattggcagccatttggagggtccaggaagagccgcgcagcttgggttcgtggccaaagtagcctcccgtgaaatcggcgtggccggatatcaggcgggtgaaaggcaacgcgcagtagtgctgcccgccaatggcggcccagatgttctgttctccgccgtaaatgccttcccggctcatttcgtgcggccaggaacgttcctcccccgtgggggtattggctccgtggaagttgaccataagcttgtttttcgccaggttttccgctacggcgtcgtagaaggccaagcgttcctgagaggcggagtccatgaagtctatcttgattcccctgattcccgttttggagagtgagccgaaaaagctgcgcatattttcccagtcattggcggggttgttgacgtctgaccatcgcacccatacccagatgcctacatttttgccagcggcgtagctggccagtttggccagcttgcccatgctttctggtagggatggcccccattttttccacccttcgtcaacgaggtggtattcccagccgaattcggcagccatatcgacaaaagcgtattggtcgttttccaggacgttcccgcggtcccaccaggtccaggtagagcggcctggcctgatccaggaggctttggaaccttccggaaaaagcttcctgtccggttccggagccagggaagggatgacgtcgttccggaccagtccgttcaggtcgtcattcaccaggatgacgcgccagggcatttccgaggatgagggggcggaaaagccgccgggatcctgaaaatataccgtatggcatgcgccatcctgaagggagaatttgatgccgctccattgcctgttgaagttggcggcttcctgtatgagcgcgacgcctccacccggcagttccgccgtaatcggcatggtgcggatacagctgcggggattgccgggatcttttttgaaatccgttattctggaaggagaccagaccccctcgcaggggcccagggcggaggaggcgtcctgggtccacaggacggttttttccggaaaggcgaaggaggttttttcttcactgatattcagcgagggtgctttcttcacctcttccgtccattcatagcggaaggcgaccccgttgttgaagacgcgggcccggagccgaagggaggagttattcccggaaaccacgtattcattgaagcagacggaagatgaggggtatttgcctcgcgtctcgaaggtgtcgcaaacgttatccttcactttttccacattccatcccgtgatgcctccggcgaggttttttccattcacgacgatgcccagcccggatggttccagaatcgttttgccgccttttttcagggaatgggcggtctggctgcccgcgtggagcctccaggacaaccgcccgtccggagattgcagggaggcatgcgtttccgccgcctgtccggcgccggtcaggaggcatcctgccgtactgctgagcataatgagtgattttacaagcatatctttatcagaatacgtccgtctttgttcatttattgcaaaacagcgaatcggaaattggaacatccatgttccgaaggagggaaaatgccgttccattggaggcatccgggcaatttccggaataaaaagggaaagcctttttttcttcccacatgaatttgtagcggtatgccgttttttcgtgaaggccggggatcatttatgaagaaaaaataatagatatcttatgttcctgtgcagatagttgcaggaaaataccggattggcagggagcaaaagaataatctttacaaaataataggaagcaataaaataaggcgcattgcaaatataaggatggagcgtagcggttttaatagtgatcctgttttttcggaccaggatgagcattccgataatgtttctgtacgcagctcctccaaattacttcctcccccttcctggaacgagtcttccgtttattccaaggaactcccggcgggagcaactttggaacattataaaatcctgaaggtgctgggcagcggagggtttggcattacctacctggtgcgggacaccatgctgaagagaaaagtagttcttaaagaaaactttccttcttcttatgcttaccgggatccgtttacagggcgcgtgatacccaacaatgaacacgatgccgagtctttccagtgaaccctttccaactttttaaatgaggcccgtgttcttgcacaactggattcgcccggtatcgtacgggttctttccgtgtttgagtgtaacggaacggcttatttttccatggattacgttcagggtcttcccatggattatctgggagagcagcagcttcttgcggggaactgttattccgaggccaagttgaaggggctgctggtgcacatcctccagattttggattaccttcataaaaaaggcatctgccacagggatatcaaaccgggaaatatcctgcttacgcaggaaggggctcccgtcctcattgatttcggcgcgtcgcgccgtatagagagcaaccacacccagaccgttctggcgacacgtggtttttcttctccggagcaggcactgggcagaaaagatatggggccctggagcgacctttattccctgggtgctacattttattccctgctgaagggctttgctccgcccagaggggaggaacggctgatcaacgacaccatacagccgctggccgcatcctcttcgttgtcttccaattattcgaaaaattttctgaaaaccatcgacaaggccctttctccgcgtgtggaagaccgttatgcttccgcagaagcatggatgaaggatctgagggttgagggaggcgccgtttcaaccattcagttctccccgaggagttcaaatcagcccgtaagcgttttttcaatttgtttgccttatcctcttcccgcattatgtcggaagggcaggaacatttgaggacgagacggaagatagcgtttgggatgattattgtcttgggaattgtgggcgcgctcctgggatattctattaactggggaaacagaacggagaatgaagatgctttagggctgcattttcccagtgtgatgtccactcccattccccagattatttcagattcaagggatgtgtcattgttaagttccatggatcattttgacgtcaggctggatagcccgtccttatcgcgtcatgctctgccgtccgtgctgcccgaccgtttttcacttgcgtgcgttcatttaagggtgcttcaggaagacaagatgtgcccgcccctgtatctgaccatacgtgatgagcaggggaagctggtttcccggtcatttaacggtttttctttcacattgattgagagtccggtgcttacaggattccgttttgtcgatctcccggcgctgaaagtggatgccccttacagattcagttttgagaccaaggataatgttccccatcctttgaaggtggtttcttcccagattacgacgctggagagcgggaaagttctgaagccccatttcaaattcatctgcgcggcgtatgatcccggtgtgaaagcttctctggacagcccggagaacagcaaactccgggaaatgcttatcgcttcccggaaaaggaaccgtacggaaattgattccatcgtgctgacggagcgggagaaggttcagttgcggaaattcgccagggcggggtacccttccgcccagtataaaatagcccgtcttattttcgaacgggatggaagatacggggaagaaggtggcgcctggctttataaggcggccatgggcggctttattgtcgctcagagggatttggcgtttcttcttgtaggaggtaaggagtttttcccggatattcttcagtgtccggtcagcctgtcccagaactattcccaggcggttgatttgctgttgatgtcttttacggcgcaggatccttccgccctgtacatgctgggtattttgtattcccaggggtgggggtggattattccgcagagatggtcataaggttgtccaaactgttggccggttccggttatgatttgtcgcggctcactttgtccgcccccattttagcccattgggagcttctgggtcagcaggagggaacttatacgcggatgtgctgttccattccggataggaagataaaccaattttcaggcgtgcgcctggtgcggacttccaaagaggggggaagtctctttattgacaaggtaattctgctcagggacgggcaagaagttatgtcccgttctttccgttcggctcttacccaggaatctcctgttctggaggtgtccatgaatatggatgattacgcagagaatgtaaagaatttcgagtggtcaatagaagtgatcatggctccggccaacacatgcggcatcatggaaatgatgggaaaaaggagctttccaacgataaagagaagcggatttgatgggaagctgccggagcggtctggcggatacgcggtttcgtattcctgccgcaaacccgttcccggcatggaaggggacaagaactgttttccgggttttcatgttttcccatgggtgaattcagccacgggatgaccgcagcggatttaaatgtttttcagcatgtccagcgtttcccggagtttgtccgcgggagcggcgcttgccagccgcgggaatttgttggacaacaggataaaatccccgtttctggtgagcatcaggcgctgtccgctgatttccaccatggagatgttggcccgggatgccaggattttgattttgtgggaatccagcaggtggcgcaccgtttccggcgtggggccgaagcggtcttcccaggcgcggagcagattgtccgcttccttaagggtccggacggcggccagatccttgtaggcggagatgcgcagggccgcgtcactgatgtactccctgggaaggaaggctcccagatagtccttgcgggattttgcggcgaactgcgtttcgctgttgacgatgaagtccgttcttagagccgcatccggacggggggccgtgcgtttgccctgcatctgggcgatggattgctggagaagctggcaatacaggtcaaagcctatggcggcgatgtggccgctctgctgggttcccagcaggttgcccgcaccgcgtatttccaggtccctcatggcaattttgaaaccggaccccagttccgtgtactgtttgatggcagagacgcgtttgcgggcgtctcccgtggtggcggcggatctggggagcatgaggtaggcgtaggcccggtggcccgcacgtcccacgcggccgcggagttggtaaaggtccgccaggccgaagcggtccgcgcggtcgatgatgatggtgtttgcgttcggaatgtcgatgccggattcgatgatagtggtggccagcaggatgtccgctttcccctgcacgaaggtgcgcatgactttttccagttcttctttaggcatctggccatggccgatgacgatgcgggccttgggcaccagagcctggatgcggtcccggaacagttcgatggttttcacgcggttgtgcagcaggaaaatctgtcctccgcgctccagctcgcgttccatggcctttttcatgatgcgttcgtcgtaagggcacacgcttgtctggacgggctgccggttgacgggcggggtttcaatggagctcatgtcccgtgctcccatcagggcaatgtacagggtgcggggaatgggcgtggcggacagcgtcagcacgtcaattcccttgaagcgttccttgaatttttccttgtgcctgacgccgaagcgctgttcctcgtcaatgattaccagacccagatttttcatggatacgtcatcggaaatgagccggtgcgttcctatgacgatgtccacggctcccgttctgagcccttccagcgtggagcggatgtccgccgcgctgctgaagcggctgagcatttcaatacgtacggggtattcgctcatgcgttccttgaacgtgcggaaatgctgttccgccaatacggtggtagggaccagcacggccgcttggcggcctcccgtcacgcatttgaaggcggcgcggatggcaacttccgttttgccgaagcctacgtccccgcagatcaggcggtccatggggcgggtggattccatgtccgctttcgtctgggcgatggcgcggagctggtcctgggtttcccggaagggaaaggagctttcaaattcccacatccatttgctgtccggggggtggctgcagccttttcctgtctggcgttccgcctggacgttgaggagctgggcggcgtaatccgccacggatcgttctgcggattttttggcgtgctgccatttggagtcccccagtttgttgagttccggcgttttgcttcccaggcctatgtatcgtgaaaccaggtgcgcctggctgagggggacgtgcaggatcgtgttgtcccggtagaggatgttcatttcctcgtctccggagtcaggggaggcggaaatgttgatgaatttgccgatgccgtagctggtatgcaccaccagatcaccgggattgatgtctttcagggatgcctgcgcgcgtgccttgcgcgccttgtcttcccggctggcgcggcggcgcgccgtagcggactggtacctgccgaacagttccgaggaagagaggacggccgttttcgcttccgggatgctgaaccctgccggaagttctccgcgaagaggggcgatggacagcagggcgggcgttccggcgcaaatgtcccggaagcgttcttcctccccttcattggggaagaacatgctgacattccatttccggtccagccattcgcggatttggcgttccgccagttcacggcgcatttcctgcatcacgaagtcccccgcctcaaagctgcccagggggttgtcatggatggccagggagaagtcttcttcccccgccgcattttccgggggggaggtgaggatgcatacgttcccccgttccttgcagaaaggggcggtaataaccaggtcgtccggtttgatccagtcccgcagggttcccgctcccgcggcttccgccaggatgaggttgacgtgttccgccttgcggaaggaaatctgggaatccacatcaaattcccggatggattcaatttcgtcgtcaaagaattccaggcgcacggggtgggaggactggagaggaaagacatccaggatgccgccgcgtcgggaccattgcccgcgggaaatgacctgtggaacaccttcaaatcccgcttcctcaaactgccgtatcaagtcgtccggtgcgtgcgtctcccccgatttcagggtgatcccctggttttgcatgccgtcgggcgacggaacctcatcgttcaggctgccttccgtcaaaacgatggtttgcccgcccgtgcggctggaagagatgcggtgaaggatattcagacgttccgcggcgagctccgggtcccccatttcctctcccagggccacctctttttccggaatgaagaggaggtggcgcactccccaggtttccagttgggctgcaagggcttcctgagcccgcaaatggggcgcgaccacccaggcccgggcggtatccggaagggttctgatgcacagggccgccacaaacggcaccccgggcagggaagtatggtcgaaaaccgcctgttcctccgtgcccagtttcgccagttcccggtgaaagggggcggtacgggctaccctgtccatcagggcggatatggaagcttcttctgccatgcgtgtctgtgaatccctgttgggggaagtgtgccgcctttccctcccgtgtcaacggtttttcagggcacaaaccgctcttcgttttccgtcgggggactgtttccacggcacgcgcggcacagttcaggaagaggaacggaagcggattttaacgccggccttgcgccatttctgttcaatttctttggccagttcttcatagcttcgtccgtcaaggaggagtttctgagcttctttttcactggttccggattgaatggctttcatgtaattcttgatgcgccgggcatcgcccttgccgtccatgtggtaaaaatagtaggccatcagggcggccaggccgtagttgaggttggcgttttctcccgtaaactgggaatagggcatgttcatgtaagcttccaggccgggcgcctcaaagtcatccccaagggcccgtccccccgtgttttttttgccgtattccgtcacgcgggagacaatgtgggaccggttggctccgaagttgaagcggcctccggcatagggcgtcatgcccatgtattccgcggagccttcacagaaccagctggcctgcttggcctgcgaagacatgagctggtgcgtcagttcatggatgagagtggaggcgtccttgtcacggtcaatgacgtaggtgcttcccatggttttgactcccagggaatcgaacggaaccagaattcttccgcggtccccgggacgcgttgtccccaggaagatgcccgccgtgccttcgcgtccgccgttttccagataggtgctgaatttttcatacaggtaggcggggaatttggcggaatcgtcatgggcaggggagttccctataggaagggttttgttggccaggtgggtggcctcaaagaggaggcccaggcgcttgatcatgccggtgcccagcttggcgtcgcagatgaagcggaaatggggtgtttcataaatatattctcccggttcctccttgatggtttccaccttgaaattatccgggcatttgacgctcctgggccacggcaggtggtaattgtctgccgtattggaggggagcgcccctcctttttcctgttccgcgatgaaatccctgtcttcccgggagagctgggagaggggaatggagacggtttggccgccggaacgtttcagcacggctttctggccgtccagcctgatgaattctgcttccagttttttcccttggaggttggtccaggtgcgcccttgtgcaaggggggcaaggaaaagggcgaacagggttcccgccgccaggcagaggcgtacgggctttttcatcaggggtaagacgggaggcacgaacatagttgcggttaatgtttgggacgcggcagcatcaggagcagcagcccgcagaacagcatcaggcatcctgccgctgccagggtggtggtcagcggaacgccctggtccttgaaccaccccccaaagaaggagatgagggcgcccacgccggcggatgtcaggttgaggaggccatagccggttgcggaataacgctcgtcgatatgggagcgtagcacgggcatgagggtggcgtccagcgatccctgcgccagcccctgcgtggcgaccaggcccagcatgagaacgagggggacggtgatgtcccagccgaagatgccgggcagcagagccagaaccaccaatgggccggatatggtgaaggtgatgcccggaaccagggctcgggcgcgggcgtttctcttgtaccacatgtccgccaggatggcgcctcccagcacggcgacgtatttggccacggagctccacagggtggcggcggggcccgcctccgcggaggagagctggtatttgtcctgaagcagggtgggataccaggtaagaaggaaccagtttccggcgccggcaaaagccactacggccagcagcatccacatggggcgtccgctcagcaggctggaaaggacggctccggtggaaagcttggaagcgggttccttgatggcctgttcgtcattgtccacattgagcagcaccgttttttcctccggttcggacggtttttttgccagggccgtatccgccggggctttggacgggtctttcaggaacaggatgaggatgacggcgtacgccacgccgatgaggccgaaaagggcgaacgtcatgcgccatcccgtccatgaagccatggtggcgccgaagccggccacggccatgcctacatagatgccgctcatatgcaggcctgtcgcgatggagcgcgtgctgccgcggtggtagtccgtaatcagggccagggcggcggggatgtagaatgcctcgctgatgcccattgctccgcgcgcaatgagcagggaagtgtaatcttccgcatggccggtccaccatgtgaccacggaccagacgacgagagagcagaggatcatcagccggcggctgtagcggtccgccagaaagccgcccacggggctgagcagggcgtaaatcagcaggaaaacggaggtgaccatgccgaactgggcttccgtctgcggaatgtcccgtacgatgggttcatgcagggcggaaaggagctggcggtcaaaatagttcagcatgaccacaaaccacaggacaatgacggctacccaggcccacaggcccggcttggtgttcgggtccgtgacggaggcaacatttttaacgccgttgcgcacggcggagacgatgatgatcgccaggacgatgatggtcagaatgagaacggcgtaatcaaccgtgctcatttcaaagtggtaacctgcggaggcggaggcgtttacgggagtccggacgcccggggccgtttccccgctgatggtcatgatttcagagcccctgacaacggcgggaaccgtggcgatgcccacgggccattccccctggcgcgtccatgtgtttccgatgacgtcatagaccaggatatcccgggactgcgccacaggcctggacgggtccggcgagttgccgcgcttgtctccgccgatcaggagaatggagttttcccgcaccggggcgggacccgcggcggcggctacgggcattcccggtccggcaagctgctgcctgccggaggagccccatttggaagggtccttggacgtcatgtcgtagccgatcatgtcggaaagatacgtcctggaggtttctccggagttatccctggacagggaacagccgcctatgatgaacagggtgctgtcgcagacggcagcggtggagagaatgcgcccctctccgggaaaagggggaagggaaacccatttcattttatccgtgtccggcgtggtgtccagcatgtagatggtattgagtgcggtttccggctgctcccggtctctgccgccgatgacgaacaatttgttcccgtgggcggcgcaggaggcttccgttacggggacgggaaggggaggaagcttttctacggagccgtccgttttaatcagcagggcatctttcaggatgccctgagcattgtggcctccggccacagccagccccttgcccacgctggcaaaggcggcgtaacccagcgggacgggcaatgttcccgccttgctccactggccgttgcgaagcttgaaaatatcctggtagtaggttttggggccgcgttcctccggagttgaggcgcccggcgcagcctgggggaagttggcgccccctgcggcgatgacggactggctgccgtcgtcttccgtgacggttccggcaaccatgccggcgcggcctgccgggtccggaaggtcgggaacagttccggacgtccggacatccacggaaaaggaggcgtcagcggccggagccgcgatgagaagcagggctgccagagcggagccgcaagccttggaaattcgggtaagggtgcgtgtcatgtgcatatgttgagaggtttaattggattccggtcaaatcaggggagggagatgctccatacctcaggagagcgcctgccgggtttgagctctccgttcacggccgcgaaacggtcctgccacgcgcaacacggaaggacagctctgggcgcggcgatggggcctgcgtcgtgccatgtcatgtctgccgtgtctaggcacagggattggttattgaagccgggattagtttggggagtgtatttttttccggagccgtcatcccccccaagcaggtaaatgacgccgtttccggaaaccggggccggggtgggggctgcggcgatggcgtaaggcatgtccggcaggcgcgtccatccgtgttccggagtatagctccaggcttccttcagcagttcccggacctgttggccgtcctgttcccgcaggccgatgccgccgagcacgtacagggctccgtctgttgcggccatctgatgcaggaagcggccgcggcccggtagcggggcctgttccagccatccctgttccgtccggcgtgtgtccagcatgaagacccggttagtgcagtcctgctcgccggggcgttcgcaccctcctgtaagatagactttcccgtccaggacggcagccgccgtatatgccagggagatggggagggaagggaaaggatgcgtggtgacagttccctccgcgaggttcagcaggtaaacgtctttccggtgcccttctttgccgcagccgccgatgcacagcaggccttccctgatgccggcggaggcgccgtatgcataaggcgcgggcaatgtgccggcctctttccattcgttttcccccggagagagcgtaaagatacggtccgtccacgttttggctcccccttcaagcatgggcttttccgggaaattggtacctcctgcacaaatcattatttctccgcaggtccctgcgtacatgccggcgaagccttccggatcgggaagggcgggtaaaggtgtccaggatgaagaatagcggctcataatacgtgtaaatgactcgccatatactagctaaaaaccggcggctgcgccagtattaacctctggtcctatttttttgaataaattcctttccttgctcctcttaccaatgtagaagaggttaatcatatgaaaacaggaacccgtttgttgattttatgcctcctggctcctgccgccctggcggaaaatatgtccctgcggtccggcagggtgctgaaagacgccgttgtagtgtcttccggagatgattttgtcaatatccagtacacggacggggtggccaaggtttcctataaagatttgacggatgcccagcaaagggattacaggatgacgccggatgaagtgaaggccaggctggaccagcgaaggatggaggaagcggcgcgcagaaagaaggcggaagaagccaggaaggcggccgatgaagaagccaggaagatccgggagtccctgtctgaggcggagcggcatccccgctacctggaaggggcggatatttcccgcatgtttttgctgatgggggaacttaccaaggtggaggcggaggttatggctctgcagtggaatgccctggaagcggaccgtgtgggtttgccggaagacgcccgcgttttccgcgcaagggcggcagcctatcaggagcagataagcgccatccgtaaaaaaagggaaaccgcggaacagtattggcaggatttggagaagaaatacctggccttgaaagacggtactcagaagaagattgcggatttgaataagcaggtttcccaattgcagggggaagtgagggaggtggccagccagccgagaacggaacgcatcattgtccctccgattatcaggacgtggaattatccgccgccgcctgtctttatccggccccaaccgccccctccccgtcccgtgcctccgcgtccgatgcctttgcccgtaaagccgagtttgtacagaagttaaagatgctccggagcattcccttttctgtccatgggcctgtgccgtttactggaaaaagggactgccggaaaggaatacgggaaacaggccgcccgtgcggctgccgccatggcctgccggaacattcctttgccgcagagggaaagcatcagattccgggcagggggaacagtttcatgcggcccccctggaaggaggccagatgcctgaaccctgcctgccgggccagttccccggcccgcttgaaatcccgccctacatcctccggcctgtgggcgtctgaactgatggtgaggggaattcccgcctccgccgccattttcaggaattgcccgtccggatattgttccccgcacttgttgtgccaaccggctgtgttaagttccaggcaggctccggtttcccgcatggcttccagcgacggttcataataacggcgcaggtctccagaagggcggaagccgaattttttaatcaggtccgcgtgccccatgatgtggaacattccggaggcggccatgttccggaagcgttcccaatactgttcccatgcgtcctccacatccgtccggtgccagaaatccattctgtggggattgtcgaattcctccttttcccccagataatggacggaaccgatcaggtaatcccatgcgtgcaggccctgcaggtgctctatccatggttcgatgccgggaaaccagtcgcattccagagcggaacggaccgtcagtccgtgcggtgcggcgcattcgcgggcttccgtgagccagtccaggtaggccggcatgtccgcctgtttcatgcgccagtcgtcaaaaggttccccaggcattggggcatggtctgaaatgccgtattcccggagtccggcgcggacggcagcctgcacatattcctgcggggtgccggaggcgtgcaggcacaggggggtatgggtatggtaatcgcagtacatggaggggaatgcccatgctagcatggcggagcggacggttcaacccggagggatgtctttgttcattatttgccgtctttgactttatgagttgattttatggacaggattttttagagtcgcgttaagtaggacacgtgacatatgaatgactggcaaggcttttccccgctgaatgattttacagggccgctcctggataacctgaagcgccatcccaagcgcattgtttttccggaaggggaggatgtccgcgtactgcgcgtgtcccagcgctttgtggaggagcaggccggcgcgcctatcctgctggggaggagggaagtcatcacgagaatggcggaaatgaacggaatttccctgaaattcgtccgtatcattgaaccggaaaaaagctcggatcttcagatgttctgcgaccgttatgaacgagcggagcagatgttcggcaacgggttgcctatgaacactcgtgagattgtttccgaaccggttcattttgccgccatgatggtgctctacggccaggcggacgccattgtggccgggaacatgaaaagggtggcttccgttttccgcgcggtaaacaagtaccggcaggatcccgttcccaccaagcccctgtttgccatttccatcgtgctcgttcccgaattttccaaaaaattcggcggccgcggcgtctattttctggcggataccggggtaaaccctgaacccacggtggaaaatatggcctattttgccgtagagacggccaaaatggcccgccacatgctgggtaaaagcgttcgcgtcgccatgctgagcgcgtccacttcgggctccgttccggaactggctgcggaccgtaccagggctgctgcggcgctggcgaagagcatggtgcagaaggattgcctgaacaatgaaatctccatagagggggaaatccagattgacgccgctctgtcgtcagattcctacagcgtgcgcgtgcaccgcaactccatgcttcagccaagtgaggtttgggtcttcccgactctggatgctgcggatatctccaaaaaactgttgtgcatgatgccgtccgtatacaactatggccttattctgggcggtctgctctttccgattgcccagctgccgcggctgacggatgaagacaggatgttcggtactgcgctggtggtggggaatgaagccattaaattccacctgttgtatccgcagggggttgctccgctttattgaccgggcgcagcgtgtccatgaccagcaggcgcttttccttgcgtacggccagttttcctccgggcagagaagttcgggaagggccgtccgtattcaggatgtccattacccggagtacggcgtcttccgtcaggtccggaatatgttgccggcgcaggtaatcatgcacggcgcattgtctcagctccgcaggaagcaggttgattttcggcaggaacaggcgcccctggggatctgtcaggttcatggagtccagcgcctgggaaagcgccgtgcggatttgattttccaggcggcaggcacgtgaaaagggaaggctggtgtccctttggaacagcgcattcaatttaggaataatctcatggcgcagggcgttcctggtatattcggcagactggttgctggaatcttccctccatggaatatggcgatgctccagataggaggtgatatcctcccgggaaaaatccagcatggggcgtacgacggtcaatccgttggcccaggtggagacggggaacatgccgtgaatgccggaggctccgcggcagaggtgaagaagggccgtttcctgctggtcgttccgatggtgggccagagccacgagagcccccggataaccggcggcccatttcagaaacgaggcctgcctggcttccctggccgcttcttcaatggctattccgcgggtatgggccatattgcggacattaacgcgttcccggacacagggaataccctgggaggcggcgtaacggagcacaaacatttcctcttcctccgcttccggacgcagctggtgatttacatggcatgcaaccaggttgcatcccggcatgccggacagcagggaaagcaaagccatggagtccctccccccgctgattccggcaaggacggggcggccggagcggaggagttccgcggactggctgtcaaaatggtccggtgtcaacatggtgctgctgcgagtgaatcaggaaaaagagatcaaaggaagcctgcaaataaaaaccccgttttccgggaaggaaacggggctggaaaattgctgaaggcagttcttacttgttgagcttgggcttgcctccgctgcggcggacggtgccgaagcgcttctggaatttgtcgatgcggccttccgtgtccacaaactggttcttgccggtgaagaacgggtgggaatcagaggtgataccgcaggaaaccacgaaatgttcaaccccgtcaataacttccgtcttgggagaacgaacagtggaacgggtgatgaagcggcgtccggtggtgatgtcaacaaaaacgaccggattatactgggggtgaatatctttcttcatggtgatgtattgcgtttccgacgcaaggggaacgcaagtataaatatgtttcattgcatgtcaagcatccccgcgtaaaaataaggaagtttgtggatgacggttcgggagcttgcggaaggaacggttgtggagatgatatgacggaaaaatggagcaggtgttgaagaggcccccctggtgggcgtggttttccctgatgggattggaaatcccttctgccgccattgcctgggcttttgccgtcagccagtcccatctggtggtagtttcctccccctggctgtatcaattcctgtttgtggctgtctggtgcgtcaatatgctggaccgggtgctgaaaatattccggggcggttccgctgtctacacggatgaatgcctgctttttgccaaaaagcattgtttcgttatctccctgctcattatggtggcggccgtgacggggctttggatcatgtttttccaattgggtgtggttatttttcaatttgcctttctgcctggcgtctgcagtctgctctttctctatttctcttccaaccctcatcagaaagggagcctgtcttccggattcgtcatgggggcgttttttgccgccgtttccttcgctacgggtgccggaataccggcctacttttacgggacggtaggcggcggctggggaggccagctttccgaacccacctggtatctggtagcgctggtcatcctctgcatgttcagccgcaaacggtggagtgaagaagaggatgaggacgggcaggattccgccgaccgcgacatggtatccctggtatggatgggggtgatagtcatttacgttgtattctgtctggccgccgccgccagggaatataccggggatgcgtggatttattatgggctggcaatggcgggggcattcatgtttgtgctggacaggctgaagatgaacatgcctcccctcctcctgcacacgctatcctgggcggcgctgattttcccattgctgttgagcggtattctggcgcaggcttcctcctgattggctgggcggattcctgctatggagcgcggcaaaatacagggaagttgaaaaaataatattttgtggttgcaatattgggaagaggatgataaattctgccccgcaagcacgttctgcgtgcaggcaagtggctcggtagctcagtcggtagagcaggggattgaaaatccccgtgtcggcggttcgatcccgtcccgagccaccattttttctcccaatttctaatccctcctttttatacgggaagtagctcagcctggtggagcgcctgctttgggagcaggatgtcgcaggttcgaatcctgtcttcccgaccattttaaagcctgtggatcaaatgatttacgggttttgttttttgagctgttccctggtggttgtccgtaaaatagatggagtggaagcggggtatgcctggaaagatgaaaaacacccctgttgcggcggggcggccgaacctgcagccagttaaaaaagccggaaatcttttgtgtccgaaacaacgcggacagaaaggcgatgcaaagttcttgtaacacccgtgtgctgacgaaagcctggtcccggcggcccggattttttctgacggcggggcggatgaataagatttgttaatgtgccgggctgaaaaacggtgtaaagaaaaccgccgcggggtgggaggtgcggcggaatggagaaaatgatagatgatagaaatagttttatttcttttttagtatataatattcggccaggacgccctgattgactgtgccttctttgtctgacagcattactttgcttccatcgagtattttataataagatttttcattggaagaggattgggccagttccatcaggcggccattgatgaaatgataagagccttttgattcgaaaatagcgtctttttctcctatgtattcgcttctcaacacataagtgttatcgttgtttaatgttaacgccgtcctgattccttcacaatcggcagcaggaagaattccttcataagtgccgtaaaaatttaaattctccaactgtttttctgtttttgtttcgccgctctcaattcgagaatgatgatttttgggggaatcacagccggttatggcaattaaacatgcggtccataaaaaatttattttcatgacaagtttttttcagctggtggtttgtgacgtgcgatgcttgatccaatggggcagggaagggagtacgttcgtttcctgtttttccggttttgccgtaatataatgaaagtctatggaaggggcaagatattttcttttcatggagcccgcgagtattgatgaatgccggattaagtaatttatcccgtttttattcaactttgccggaagaagagttttctaaccgggattgagtgttttgtagtccgttttgcgaagatgttgttttttttgaggggagccgagtgtctggggaagccccctctttgcagatattgccgagaaggctggattttttgcttgagattaggaagaaggcttgcagagtggcttgatgaggcccgtccgacaaaagacattttccgtttcctggctggcggggttgaggtggtcgtttggcgggtatgtgacgggaacacttctggcggcgggtgcgggggcactggattttcccttgctggcgcaggtgatgcttttggccgcggcggtttgttttgccgcctctcttgtttgtgcgggagcgtgtttccggggcagcaagattgcccggtggtacttgcttcttgtcctcgtgatgattatggttgcgattctgtttgggaatggaagcggttaattagtcatttgtatatcttttgattgaccgcgtgcgcgcgtatgtatactttccggtcatgctccttcgattcttatcgagtctcttttttgcgtccggcattgttttgaccgctcaggcgaatacccagccttatccggattccgattcttctgacggatacgataccggtttttatgcagaggcttattccggcggctacgacagcgctccggctccggcgggggaatccgcctccaagcctgttttccccacgcagtcctattttgaattgcttggccccatggattccagaaacgggcgcggaagcgtggatatccagaattggatgacggatttgaatttgtgcaggatgtccagcggttcctggaatttttcttctacggcggccttgcgtctgagctggtttaatggaaaaggagcggatgagatggatgtggaccggctgtacacgatttggctgaatgtgaacgcctcctatgccatcacggggaagacgcgcctggttttcggtgtgacgccccagatttccacggatttcgatacatggacgagccataatattttcttgggaggccatgttcttctggcaggccccttgaacgaccggttcagctatggaatcggcatcggctgttatccgcagcttggggattatcctttcctgccccttatccagtttaaatgggaagcttcccgcaattggacgcttcagctggaaggggcccgcctttcctatatcaacaaggtgagcgatgggttgaagtggggacccttcgtttccgtggtgtccggcacatggacgattcaccatgatcgccgcgtccgccagtttgcatggatttccggcgtcgccggcataggcgccgatgtggggttggggcactggggcagcgtgcgccccaggctggtggcggatgtcggtttttccttcgggaattccggcactatcaagacaagcaacggaagccatgatttggaaaaataccattatgaccccggtttttatttgcgtgcggggctgctatttgagttttgaccggccaacaggattagcgaatacatgacaaaggcctccggtgcgttgaatgtgccggaggccttttacatatggggacgtttgaagccgggacggttcccggaggcaatcaggcttcttcaacggagggtctgcccacggagtggtattcaaatcctacggcccggaggtttgccggggagaggatgtttcttccgtcaaagatgatgcggttgcgcatgactccggcgagtttctgcagatccgcattcgcatattcgctccattccgtggcgatgaccagaacttccgcatcccgggcgcattcgtacatgtcttccaccagtttgacccccatagggttcagaatgggggccgccgtgtgcatggctttggggtccgtagcggtgacaatggctccttccccgcagagtttttcacatagtttcagggcgatggattcccggacgtcgtccgtgttctgtttgaaggcaaggccccaaacggctatctttttgtccttgaggacccacaggcggtcccgaattctgtccaggaagtggatatgctgggtatcattgatgtgttccacttcctccaacagggtgaagggaatgcccagcgtgcggctgatgttgatgaaggctttgacgtctttcgggaagcaggacccgccgtagcccagccccgcgttgagaaagtggcgtgagatgcgtttgtccatgccgatgccttccgccaccagttccacgtctgcgcccgttttttcacagaccttggcgacagcgttaatataggaaattttcagagccaggaaggagttggctgcgtgcttgatgagttccgcggagttgacgtccgtttccagaatgggggcatgaatgggctggtaaacgcgcttgatgacgttcatggcctgttccgagttggctccaatgacaatgcggtcagggtgcagcaggtcgtccacggcgcatccttccctcaggaattccggattggagacaatgtcgaactgaacattcggccccgcatagtgcttgatggtctggctgactttttccccggttttgacgggtacggtggatttgtccacaatgaccttgtatcccatttctggttggagcgcctgggcgatttccctggccactttttcaatgtaggtcagatccacggaaccatccgtattgggcggcgtgggcacggcgatgaagatgacttcgctttccgcgatggaagcggcgatggaagtggaaaattccaaccgccccacggctacgttttttttcacgagctcttccagcttgggctcgtaaatggggatggccccggattgaagagtacgtattttttccgtattattatccacgcaaatgacgtgatggcccatttcggcaaaacaggtgcctgtggtcagccccacgtaaccactgccgataattgttaaattcatagtgttagcgtaaatattggtaaaaacttaactgtatggaaaagtaagagcagtcaacccctgagcattatgggatagggaattttttctgtcaaaataaaaagttcctgattgagcgcctcctttccttgtggtataaccgtgaccagacaggaaaatatctgtttattttaatttgaacgttatatgaaaacacctatcaccgttactgttacaggagccgccggccaaattgcctattcccttctgttccgtattgcctccggcagcatgctggggccggatcagccgatcaacctgcgcctgctggaaattcccccggccatgaatgctctggaaggggtggtgatggagttgcgtgacgccgcgttcccgctggttaatgaaattgtcccgaccagcgatcctgatgaagcgttcgccggcgccaactggtgcctgctggtaggctccgttccccgcaaggccggtatggaacgcaaggacctgctggatatcaacggcaaggtgttcatcggccaggggcaggccattgcccgcagcgccgccaaggatgtgcgcgtgctggtggtcggcaacccctgcaatacgaatgcccttattgccatgcacaatgcgagcggcgttccctccgaccgcttttttgccatgacccgcctggatgaaaaccgtgccaagagccagcttgcggaaaaggccggcgtccatgtgacggaagtgaccaacatggccatctggggcaatcattcctccacccagtaccctgatttcaccaacgccaggattggcggcaagcctgtgacggaagtcatcaaggatacggaatggcttaagggcgatttcattaccaccgtgcagcagcgcggtgccgccattatcaaggcacgcggcgcttcttccgccgcttccgccgcttccgcagccgtggataccgtccgcagcctggctacccagactccggaaggcgactggtattccgtggccgtttgctccgacggttcctacggcattgaaaaaggtcttatctgctccttcccggtccgcaccaccaaggatggcggctgggaaatcgtgcaggggctgccggttgatgcgttctcccgtgaaaaaattgacgctaccgttaatgaactgaaggaagaacgtgacgctgtttcctctttgttgaagcattaatgttgatttgctcttgcgccgggtttcccgttttcgggaagcccggttttttatgtcctgaagattccataaacctcattttctgcgggacagaagttttcttccgtgttaaaaaaaacgatggatgcagcatccgctagtttatggatcaggaccgcatattatacaggggagaggcttttacgctgaccggaaattccttgcgccaggatgccgcgcattgggcggaggtacagccggacggtcaggtgaaaaccatgaaaaacggccgctattccgagtggcgcatctttccggaagccgggaacgccccgcattaccggggaaattttgaagtgcttaatcaggcttacggcctggcgttgcatgaggctggagccctgcttaatgaagaagggacgttccggacgggagccaactggcctactgtgtggacccgggatatttcctattccacccatctgggattggggttgtggaatgtccgtgcctgtatgaacagtctgaatgcacgggtccggaacggggaggtggagcaggataccggcacgggcggttcctggcccatttcttccgaccgtgtggtgtgggggatggctgcgtgggaagtttactgcctgacgggggatgccgactggctgtccctttcctgccgagtgatggaaaagacatgcatgagggatgaacaggtgcttgcggccacgggcggcttgatgaagggggaatcgtccgtgctggactggagggagcagagctaccctgcgtggatgacttctgccgatattggggattcttgcagcctgtccaccatgctcctgcatgcggaggcccgcaagattctggcgcggatgttccgggagctggggctggaggagaaggcccgggagtgggaggagaagagcgtttccctggccgcggttattgagcgttttttcaggattccggaacatgtcctgtacgggcagtacctgtacggacgcgggtatcccgtactgtcggagaaggtggattccctgggcaatctgctttgcgtccttctggggcaggctggcggttcccatgccgccgggatggttgcctcccttcctcatggcgtttatggcattccctgcatccatccccagatgcctgatagcgtgcccgcctaccataaccgcgccatgtggcctttcctggagggctattatgcgcaggccgcggcggcggtggagaatgaatctgccctggcgctggcggtcgcctgcatggtccgtgccgccctgttgtgcggcacgaacaaggaaaatgtccttctggaaacggggctggatgaggggctgctgctcagttcggatagccagctctggagtattgccggcatgctgggctgtttttacaagggattgttcggcatccgtctgtctccggattctctggaattccgtccttgcgttccaaagtcttttgaaggcgttcatgagttgtccgggctggaataccgcggcatgacggtagatgtgtttctgcagggctgcgggcaccggatagcgcggtgcctggtcaacgggcaggaggcccctcccgtccttttgccgggcatgaaggggcgcgtttttgtgaaattggagctggacggcggagaagaggatgaaggggcggtgaatttaacccgcatgggcagcagcctggagtctcctgcgtggaaggcggcgcgccatggtattgcatgggagtctgtggaaggagccgattattaccgtgtttaccggaatggcatccctgtgtctcaaacggagtactgccattatatccccgcacccggccggggggacgtgtctttccaggtgatggcagtcgctctggatgggagggagtcttatcttaatgaacccaatgattatccttctgcggattcccgcatggagacgcgcccctgcggcttgagcggggatgaagtctggttttcccgcgtcacggaatccccggacgctctttgttacaatgtcaatatagataagcccggagtgtaccgggtggacgcctttttcgctaacggcacttatgatgtttcagacgggaatacctgcgccctgcgcagtctgtacctgaacggcaggcgcgcaggcacgctggctttcccccatacgtcccgttccggaaactgggagtattttatttattcaacggcagtggaaacggtgatgacgcccggtccctgccgtgtggaagtggtgtatgattccttttccgaaaatatgaatcgtctggtgaatgatatggtgataaaacaccttcggtttacccgtatatcctgatattagttcatgaatgttatgtcgaaacgtttttttgccttgttgctggtcctggggtccgggatatggagtgttcctgccatggggatggatgaggagtcagcttccagggcatctgttcctgcctcttcggacagggagggagcggagtttacccggctgcccgtcagctggacggttaatcccagggatgccgccaatgcccgtgccgcctggaaaacgctgagcgcctatcatcggggcaaaccgaagtctgccagaaaattgcatgtggtttacgtaacgttcaaggacagacctgcccttgaaaaataccgggaacggtatgatcatattctgaagaatattcaggcatattatgcggaccagatgcaggccaacggtttccctccgctcacattccagctggatttggatgaacggggcaagctggttattcatgatgcctatgtggataaacccatgagcgagatgagcgtgcagagctccggccccgtctcccgggaagccgccaggaaggtgctggcttctaaagggattaatattgagaaggaacatgtgctgatcgtttgccagcttccggacggcgtgggtccttattacggcggcggcttcagccaccagggcacggggtggacctgtgaccaggaagggctggatcccgccagcttcatggatacggaaatgatgcagggcggccgtttcaaggtgaccaaggggaagaacgccaccatttacataggcggtacggcccatgaattgggacattccttcggtcttccccacacgggcgacggatggaattaccccgacgccggagcgtccctgatgggtcatggcaattccacgtacggcgacgagctgcgccatgaagggaagggcgcctatttggcgccgacggatgctttgaaattggccagtgttcccctgttcaacggggtggagacggaacttcccgcagacgcctccttcgggcgtatgctcggcaagtatgtcccgggggcttttgaacggctggaggccgttcccgtcaaagacggactgcggttgaaagggcgggttcatctgacgcgccctgcgtatggcattgttgcccatttggatccgcccggaggttcggattatgattccaatgccgtgggcgcttctctggatgaaaagggagagtttgagctcaccatctgcaggccgggatataaggggggttttatagaaatgcgggtggccgtattgaattgcgacagcacgcgcagcatgattactctgcccgtgtggatggatgcccggggagccaaggccccttctctggcccagatcgtttatttcggggatgttcagaatctgtggatacggggccgcacggaagaagcccggaaggcgctggcggaagtggaacgcaggcatggttcccgttctgaagtgaaagaatggctccctgtctggaagcgcgctctggggcgccaggagcccgcgctggaagttgttccggcgcagattcctgcggcaaccgccagtatcagcctgaatgactgcaagccttccgtagcccaggtggggtgggccgttccgttgtgggatgtcctgttcccgtcggatttggggcccgtgcctttcttccggacaatcggaaggccggaacgtttcattctggctcatgccccggctgtttttgcctatgacctggatgggcgctggaaagagttccgcgctgatgtggggctgcccttcggctcccgcggcagcgtcaaattcagcgtgtatttggacggcaggaagcttatggaatcccctgtgctcaaggacggggactccattcccgtgaagacggaggtagagggcggcaggaagctggaaatccgcgtggatgacgccggagacggcaatgccgccgattggggcattatagccaacggcatgctgacccggtaaattttctgcccccactggcggagaaatgtgacattaggcttgtcttttgccctttctcatagtgttctgtgggctagccatgattgggacgattgcaaagctatggggtgcggcggcgctggttgccggggcttccctgtttgcagaaacggctgcggagcagccgcccgtcccttcctctgaaaccgggcaggaaaatgccggagggaaaatggcgggcaatctgctttccggcactctcatgccgcagattccctccaatatttccattaccaatgacggcgccatcagggtggaggaatccaggaaggttatttttgaaggaccgcatgtccacatggtgacggataccggggtggaggtatttgcggattatgcccaggcggatatggaccagggcaaggtgtttctgaaagggaacctggccatttaccagagtgacggcaggacaaggaccaacagcctggtacgcgccgacagcgcggagtttgactgggagaacgaagtgcttcttacggatgccatccgtgcgaagatggagggattgattctgcgcagcggaaagtttgaatcccggaaggatgccgccggcaacacttacctggaagcccgcaatgcctccgtcacggcggaagacatcagcgaacctctcacctggatttccgcggacaggatacgagtgtatccggaagacaggttttctttcaagaacctgaccctttattacggtggcgttcccttcttttatttcccctacctcagccattcccttaatccggaagttggctaccttcccatccccggcatgcgctccatctgggggccttacctcctgaatgaatacgggttcctgatggggaaaaaatggtcggacaacggtatgccttccgcggattacctgggaaccctgcatgcggattaccgcacccggcgcggtttcgcctacggattggacatccgcgacgtgctgctggaaaaggattgtccggacatgacggggctgtccttttacaaaacccatgacaagggtgtgaaaatcaacgccggtgatgatgagtaccgtgagcatctggatccggaccggtggaggttcgcgctccagcagatgtggagccacagggtgaatctccgcacggactggcggttgaaggccaacatcaacatgttgagcgacgagtacatgctccgcgatttttatccggaaatttatcagcgcaattcttctccggacaacacggtgcttctttcccgtacggacgatacgaatgatttttcactgttgcagcgttttgtccccaataatttctacatagcggaccagcggacggagttcagttatgagcgcatcaagtcccccgtattccgttcccccgtcatgtatgaaagccgcaccagcttcgctttcctcaagcagtacgttcctccgttcatgcggacggaaatccggaacatgctggacgggatggaccccggaacttcttcctatgattactgggcccgaatgctgatgacggacagctacagcaggttccactccttccatgaggtttccgtttccaagaaaatcatgggattcctgaacctgacccccaaagtgggcggaggctatacgggatattacggcgtggaggactacaaaccgctcaaccagggaattttttacgccggaacggatgccgatttcaaattctcccgccgttattcttccgtatatagtgattcctttgggctgaacggcatgaaccatattgttcagccccattttacgctggcgtatgtcaaaaccaaccgcctgagcgagctttatccccagattgacggcgatacccccacgaccaatcccccatccttgagcataggcagatacacggagattgattccctgtccacggggcttgtcttccggtatggattgcgcaacatgctgatgaccaaccgggatgctaattcccaccgctggttttcctgggatgtgttcatggatgcctatctgcatgatcccgtcaaccgtcgggatttttccaaccttttttcgttcatgcgctggaatcccgttccctggatggaataccggtcggaaatgcaggctcccgttttgggtaaggacaagatttccggctgccgtgaatacaacaactccctgcgtttcatgccatggcgttccacggaactcgtcgtggggcaccgttatttgaaccagcattcccttctggaggacagcagccagctggatttgcgtattttgcagcgcttttcggaagcctgggctttcagcggcaagtggcgtttttctctgttggacggcaagctggacatccaggaatacaatgtgtaccacaatatgggatcctggtatttgggcgtgggcgctttcgttcgcaagaacgggaacaaaaacgaattcgggctgggcatcagctttaccatccagcagaccggggattatatgccggtcaaattcctttgatatccggaaaggacacggttttttgcggggtttttcccggaagctttttcctttttcagaggattcgcattttgagaatgggttctgcccggtgcggggtgttgttccggaaagggaaagatatgtagctggtcggcaagaggcggaaagcctacggttggaaggatggagagcggcctgtttccggcgtgccggacaggaagaaaggaagaagaggcaagaagccgctgccgcgcttgtgccggaaccttggcttgcattccggcagggaaacgggaaaaatgccagggcatggagcaagctgcggcggaaaaccgtccggcttcctgcactaataatcataaatgaatatgaacgctcaggaattgatcgagacgctggaatggcgttacgccaccaaggtattcaatccggaccgccgcattccggcggaggactgggaagcccttctggaatccctgcatttgagcccttcctccctggggcttcagatgtggaagttccttgatgtccgggatcccgccgtgcgttcccggcttagggaagtttcatgggggcagccccaggttacggacgcttcccatctggtggttttctgtgcccgcagggatttcaagccggaagacgtgcagcgctatctggaacgtattgtggaagtgcgcggtgttgccatggactccctggaccagtaccgcgcccgcatttttgaactggtggattccaagtctccggaagtgctgaaagcctggctggaacggcaggtgtacatcgccctcgggttcatgatgagctgcgccgcggatctccgcgtggacacctgcgcgctggaagggatggatccggccgcctatgaccgcattcttcatctggaaaattccccttattacacgctttgcgccctggctctgggttaccggaatgaagaggcggataagtacgcccgtctggcgaaagtacgttttgaccgggatgaggtcattccggtcatctgacggagttttttactaatccccggtttcaagcagtagccgcatgtcttccggcaggggggcttccgcggtgaaggtttcttcatcaaacggaaattccagccggcaggcatgcagcgcgtggcgcggcagaaccagccgctcctccagttcccggctccatccgtgctggatgtattccagatagcaatgttcggacggaccgtaaattttgtcacccaggatgggatgtcccaggtgcgccagatgcacgcgtatctggtgcatgcgtcccgtttccggaatgcaccggaccagcgccagggggccccggcgtgtattccatgtccgttctttccggaaaacggtagtgcatgcttttccggctgggtgcacggcctgtttgacccatatgcggctttccgcgacttccccctgtcttaaaatgggggcggtgcatgctgtttccgtccattcaggccattcctgcacgattgccagatattccttgtgtatcaggcgccgttgcatggctcttcccagctctctggccgcccttttgtttttggcgaccagcgtcagaccgctggtttccctgtccagtctgttgaccagggagagggcggctccgttggctatttcatagcttagcagggcttccacgccttccaggaggcagggttcctttttcccgttggacgggtggacgatgaggggggctcccttgtccaccacaatccagtccccggattccgccgccacctcaaagtgcggaaaacaggcaattggtgcttcggaaatgggaatccacatggcggatgggaggtttacagcgcatccggacggatgggcgcccattcccccggtttcaggttcaggctgtccagatgcagggagccgatggaaacacggcacagagataagacgggagcgcctacggcagccagcatgcggcgaacctggtggtattttccttccgtaagcgtcagcagggcgcgtcgcggttcccggatttccagcagggcgggggcgcaggggcggggttccccgttcagcgtgagggttccggaggcgaacaactccacggcttctgtcggaatgtcctcctccgtgacggcttcgtaaactttggcgacgtgatggcggggggaggtcatgcggtggatgaattttccgtcgtccgtgaggagaagcaggccggaagtttctttgtccagccgtcctacagaagaaaccgcagggttcctgtgccgccactggaagggcagcaggtcgtaaatcaaatccccctccccgtcgtcatggctgcaggtgtacccttcaggtttgtaaagggcggcgtacaggccgtccgggaattccacaggttctccgtccagcaggatgccttccgcctgcaccttgtccgtgggggaggagcatggttttcccttgaatgtaatggagtggcgtttgatccaacccggcgcttccctcctggaacaatatccgtagcgggataaaagggcatccagtctcatgcggcatattttttcctaacgggaacaaaaaacaaggttgaagtatgcctccccggctgatagcattaaactattacatgcggggccgctctgatggggcgctgccgttgttcaccatttacgcttatatagttccatgattgaaacgattacagaagaacagttgactccccagcaggccgaattttgggtgcgcgcccgccaggcggtggacatgaacaattatccctatgccgtcagcctgctcaaggccctggtaaagcagctccccggttttctggaaggccgcaaggcgttgcgcgcctgtgaaatcaaattgaatccggaggccaagagaggggggctgttcagcggtatgaaaatcagcaccagcaagctcacttcttccaagaaggacgcggctacccagctttccgctctggaagacgaattggaaaatgatccttacagcattccggtaaacgaggccctgtacacggctgccatggaagtaaattttccggatctggccgcttttgctctggagaccgttcgccaggggcatcccggcaacaagaaaatgctccacatgctggcctcccattacgtttcccgggatatgccggcccaggctgcggaagtgtaccatgaccttgtgaagctggatcccacggacagtgtggccgtaaagagcgaaaaggactgcatggcgcgcgccacgatgcagcagcagaagtgggaggaggctaaaagcttccgggacgtgatgaagaactcgtcggaaacgaacaccctggacaagagcgacaagaaagggctcacccgtgcggaactggaagagcgcctggggcttctctccgcccgttacgcccagaaccagcaggatctggccgtcgtgcgcgacattgccggcgtttatgaacaaatggaagattgggccaatgcctattccttctataattacgcgttcagcctcagcaacaatgatatttccctggaaaacaaggcctcggaaatgaatgagcgatgccgcaaggcccaggtggaggaaatccgccgccgcgctgccgcggagccggataataaggaacttcaggaacagcttgcccagtttagcaaggaagctgcggagcagcaggtggctttgtgccgccagcgtgtggaaaacaaccccacggacccgcaaacccgttttgagctgggccaggccctctttgactgcggcaattacacggaagccattccggaactccagcgcgcccgcaacaacccccatatccgcatccgcgccatgctgttgctcggcaagtgctatgacgccaagaacatgcatgatatggccctgcgccagctggaggaagccaataaggaattaatagaaatgaatgacaccaagaaggaaatcctttacatgattggcttgctttatgaaaagcagggcaagaagggggaatcccttgctgcattccagcagatttacgacgccgagtacggctaccgcgacgtagccaggcgcgtggaatcctcttacggcaattagggcggttcccgttttgtgcccgtaatgggacgccgtgttcaaagcctttgccggaaacggcaaaggctttgctgtaggaaggttatttttatttctgcggacgagaaccgtaacagcttttattccggcgggcaacggagaggggcgggagaccttgtgttttttcttgtccgttccggaaggaactgaaaaaatgaagagagagcaagctgatgcaggcattgcttacgattgatgttcaaggtgattattttacggaatgcactgcatgcagagaatcctgtgagtatgttggcagctggttaagtatggatatcaccaacgaatatgagaggatgccggatattggctgcatgggaaagattggggttctttcttatgaaatgccagggagggaagtcttatgattcttttgattggcggcagcacgcatacagggaaaacactcgcggcgcagcgggtgcttgaaaaatattcctatccctatttatccattgaccatttaaagatggggttgatacgcagcgggatatgccctttctcccctgaaagccccgatgaagagctgactcccttcctctggggcattatcaaagaaatagtaaagaccgcgattgaaaacggccaaaatttagtggtggaaggttgctatattccctttgactggaagaaggattttacgcaggcctgccgggaacggatacggtatgtatgccttattttttcagaaaattatattcaaaggcattaccatgatatcctgaaccatgagaatgcgattgaacggcgcatggagagttctcccgttacgcaggaagagttgctgcgtgaaaacagggacaatcttgaaaaatgcaggttctatggctgtgactatctgttgattgacgagtcttataacgtggagatcatgttgtagagaacagaggcttcccgttgtccggggaaggaaagagaaggttattccaaattgcttggtttataggcgcaggcggtaagagagaggttcttcctctcttcctctgtattttttccaaaactgcccgtgtcagagcaccttggaaaaaaactcctgcagcctgggattggcggggcggtcgataacgcggtccggaggcccttcttccacaattttccctttatccatgaacaggacgcgggaagccacctcccgcgcgaaccctatttcatgggtaaccactaccatcgtcagtcctccctgcgccagctccttcatcagggagagcacttctcccaccatttccgggtccagggctgatgtcggctcgtcaaacaggatgacatccggattcatgactagggcgcgcacgatggcgatgcgctgcttttggcctccggaaagctggaggggataggagtgcctcttgccgtacagcccaatgcgctggagaagggtttccgcctggtctgctgcctcctttctgctggagcgtcccgttttaaccggggcgatggtgatattttccagaatggtcaggtgcgggaaaagattgaaatgctggaaaaccatgcctacatgctggcggaattgattgacgtccgttccgggagaggtaatcagctttcccttgaaacggatttctccggaggtcggttcctccagcaggttcaggcagcgcaggaaggtgcttttaccggaaccggacgggcctacgatgaagaccacttcaccccggtcaattttcgtggtgacatcgttgactgccgacacggagttgaattccttaaccaaatggctgatttggaacatgggagtgtttccaggatgttcattcattgtttttcagttttctttccagtttgccgagcatccagctgaacagcatgaccacggagaggtaaatcagggccacggccgtcagcggcatgaaggcggtataagtctggctccggatgatgtcgccgcccttggtcaggtcctggagggcgatatagccggagacgctggtctccttcaacagtacgataaattcgtttcccagagagggaagtacatttttaaaggcctggggcaggataatgtaaatcatggtttgggcatatcccaggccgagactgcgcccggcttcaaattgtcctttgtcaatggacataatgccgcctctgatgatttccgctacataggctcctgagttgaagccgaaggccaccacggccaccaacactttgctgacatccacggagccgaagatgacaaaatagatcatgagcagttgaacgaccaccggcgtgccgcggatgactgtcaggtacagtttgcagagggcattcaggaaacggagattgcccgttttgtcatgcgtggcgcggatgacggccaccacaaagcccaccagaatgcccagcagaacggaaaagaaagagacctccaccgtcaccagaaagccgttggtcaggtatttccagcggccttcctgcatgaaattgacataaaaggattctttcaggtccagccatgtattttccagccagcctcctccggaagcgtgttgttcgggaccggcagcggatttaacctgcatggccgcataagcgttccgtatttcctccagctttccggaggctttcaatgctgcaatggtgtcgttaatatcctgaaggagaaccgtatctcccttgcggacggcaatggcgtaggattcggaagtgaggggttccggcagaatttccagccgttcattgcccgctacgtacatttttgccggatcctggtcaatgacggcggcgtccaccttgcctgccgccacggcggccacagccagcgctccgttagggaagcgttccggctgctggatgttccgtgtgacgtaaatgtctcccgtggccccgtgctgcactccgattcttttgccgcggatatcttcccgcttccggatgggagaacctttgggaacgatgataacctgagcggcttccacatagggaatggagaagtccactttcctcctgcgttccggcgtaaccgtgattccggaggcggctacgtccgccttcccggaaactacagccgtaatcacggaatcaaagctcatgtcttcaatgaccagctccctgccggtgcgccgggctacctcccgcatgatttccgggtcaatgcccaggatggtgtttccgtcccggaattcgtagggagggaaagtcgcttccgtcaccatcaggattctgccgttttccgccgctggtgcgccgcagcataggagaagccaaagcgtcagcagggctccgagatgattcagaaaggaaatggatggcatgaaagcaagggggaaaaggtgaagtctgaaccggcggggtatatgatttacctgcctgcaacgcaataaaaaactgtttcttcccggttccggtttgtcctgtctcacggcagggaagcggagtagcgggccggtcggagaggaaatggcaatgaatatgaatggcatgaacccggcaaatacccaggatttttttgtttattagcaagagggagggaatgtatcttgtgataattttcccgattaatttttccaaagggagggaggatcagacttcctgctttgagggcggtgtatgtttggttttggaaaattgtcatgcatccggaatgtgatgcatggcaaggtgcatggcggaaccataggaccggatggaataccgcgcagagcaaaaaagtttgaggccttgcagaatacttcattctgcaaggcctcacgaatgggaaaatggtcgggttgacaggattcgaacctgcgaccccctgcaccccatgcaggtgcgctaccagactgcgctacaacccgatgaactcggaccgaccggggtcgtgtctcgtgacggcgaggtgtatataggaaaactttagtgttggcaagagtcttttttcatagcataccttttttgtcatgaagcaagttcaagttgcagtcgtcggggccagtggctacaccgggcaggaattgttgcgcatcctgctgaaccatcgcggggtgaagctggtgtgcgctacttcccgccagtatgccgggcagccgttgtgggaggtttttccccgtttccgtcaggttccgggttccggtctgaagtttacggattccgatgtggaggcgattgccgctactggggcggaggtcgcttttctggccctgcctcatggcgtggctgcttcctatgcccgcggcctggtggacaggggcctgcgcgtgattgacctgagcgcggatttccgtctggacagcccggaggtgtacgaagagtattacgggaacccccacccggatacggccctgatgcaggaagccgtgtacggcttgccggagtggcgccgggaggagattgcccgggcgcgcattgtggcttctcccggttgctatcccaccagcattcttttgcctctcattcccttgttcagggcgggcatgctggagccggaggacgtggtggtctgttccggcagcggcgtgagcggagcggggcgcaaggcgtccattccgctgctgttctgcgagtgcaatgagagttttcatgcctacggagtgccgaaacaccgccatttgagcgaaattgaacaggagctttcccatgccgcgggggaaacggtggtgatgtcctttaccccccatctgattcccgttaatacgggcatctgctccacgattacggccaaagtgaaaaagggggcggaccctgaatgcgtcggccgcctgctggaagaagcttatgccgcggccccgttcgtccgccttctggggcgcaaccagcctgcggataccaagaatgtaacgcggacgaactgtgtggacattggctgggcttatgatccccgcacgaaccgcgtgattctgatgagcgcggaggataatgtggtgaagggagcggggggccaggccgttcagtccttcaatatcatgtgcggatttgatgaaacggaaggcttgtgggttctgtagctttttgatatgttgaaagacactttcaagacgatgaatgattcatcctatattccggttgacgggggcgtttgcgcgccccggggatttttggggagcgccgtaagctgcggcatcaagaagcctacagacacgcgtctggacctggccctgatttattccacggaaccctgcgtgtccgcaggaacgtttacgaccaaccgcgtgcaggccgcctgcgtgaaggtgagccgggagcatctccggaaaggaaatatccgcgccatcgtagcgaacagcgggaacgcgaacgcctgcactggaacccgtggggtggaggacgccaggggcgaatgtcgcagcgttgcggagcttctggggctgaagcctgcagaagtggccgtatgttccaccggcgtgattggcctgccaatgcctatgatgcgcatttacccgaagtttccggaattggcgggggggctttcccgtgacaaggggcatgaggtggcccaggccgtgatgaccagcgacacgaaggagaaaatcattgccattgagtttgtagtgcagggtaaacccgtgcgcatcggcgcctgctgcaagggggcgggcatgatcaatccctgcatggcgaccatgttgtgttttatcacgacggatgcgggcgtttcccgcgatgtgctggagctgtgcgtccagtccggagtgaagagttcttttaactgcatcaccattgatggagacatgagcacgaatgacacggttctggtgatggcgaatggggcatccggcgtgaagctggaaactccggaagatatttacgcattccagcaggctttggcccatgtgatgctggaactggccaagcacatcgtgcaggacggagagcgggtgaccaagttcgtcaccgtgcatgtgacgggaggccgcacggaggatgaagctaaaaaagcggcggaagccgtagccaagtcttccctggtgaagagttcctggaacgggaacgatcccaactgggggcgtattattcatgctgtgggctactgcggagcaaaggtggacgaagagaagatagacatcgacatcgccggtttggccgcctgccgcggcggcgtgcaggcggatactccgtccgacgatttgcggcaggccgtgcaggttcccgcgttccaggtggatatcaatttgaatcggggcgagttttcccatacggtgtataccacggatttgtctccggaatacgtggatttcaaccgttccgagtatgcgtactggaaccaggcgaaggcggacggcctgacctgttaaccggttcagtcatggcgcgtggcaaatgccgccagggaaaggcggggggaatggctccctccgccgggatgctgatggaggtgcggcgccttctggatgaaggcgctttccgcgcttcccgcgcccagcgtttctgtaccggcgctgcggattgctgccggttccgcctgaccggggagacgccgcatgtaacgctgggtgaggcatgggtggcctggaaggcgtggcgcgcttccggacgtacccggctggagctgcctccggacgggagctgcccttttttaagcgggcagagaaaatgcatgatttatgaaggcaggccgttagcgtgccgcactcatttctgcgtgccggccgggggcgccttgccccgccgggaggtcattgacctgattcatgcgctggaagatattgacgccgcgctgggcggcgatggcgcgtcccggcttccggaggccgtggaacggctgtcccgaaaaggcccggcggacggaaggaagaggcggcgatgactgtccggggttttgacggctgtcaggtatctatttccgggcggggacatgttttcccgcatgtgttgatgaccggatccacgtcaaggagatgggatttcccggggaggcaggcaggaaaacgacttttcagtcctccgagtccgttttttctctttttcctgtttggaagccagatggcgcagggcgctggcggcctttttgttgccgtgccggacggctttcagataccattcttccgcctgtttatcgtcctgctcaatgccgtagccgtgggcgtagcagttgcccacattaaacatggctgtggcgttgccctgttctgccgccttaaggtaccatttcagggcttcttcccggttgacgggcgttccttttccgttcagatggcaccaccccaggttgagctgggctgttgtatgcccctgttctgcggctttggtgtaccagtggacggctttggccatgtccacttccatgccccggccgttgccgtagcaccatcccagcgtgtattgggccgtaatctggccctgaagggctgatttgtgataccacaccagcgctttgtccagatccggctccacgccgaaaccgttttcatagcaccagcccagattgtattgggccgtagcgtggttctgcatggcggcttcttcataccagtaagcggctttccgcgggtttttgggggtcccgcttccgttgccatagcaccaggccaggttatactgggcgcgggggtctccctgttccgcggcctgcttgtaccagtatacggcctgttcccagtttttccggctggggctgttggcataaatccagccgaggttgagctgggctaccgcatggccctgttccgccgcttttttgtaccacccgatggcctggtgttcgtctttttccactcccaagccgttgacatagcagaacccaaggtcaaattgcgcggtggggtgcccctgttcggcggctttccggtaccagtaaaaggccttgtcgttgtcctgaggggcgccgatgccgttggaataggcccatcccagattgagctgggcggtaacgtgacccagttccgccgcctgctggtagcagtagaaagcttcctgctggttttccgccaccccgcgcccctgttcgtagttgattgccagctggaacagtgcctgggcgtctcctttcagagctatttgctgaagggtttctacgtcgacggaataggtggagacggtgttttcctgctcgccgtggttgtgggaagcgtcattcatttcacaggtaaccgcactggggaacactgggacaatttttgctctcctgaacttgtgcgctcgccgattctgcacatttcccccataagaatcaagacccgtttttattggggccggagttcggaaagcgttaccgtccagcgcgcctgcggcgggacagggcaaggaatgaaccgcagaggaagaggattccggcgccgggttccgggattctcagatctcccagcggagcggtgaagctctgtatttcccccaggcggatgcccgacagtcccgcttcctcgtaattataactgtacacgtcgttttctccatccaggctggtcagataaatatcgcagtgggaggagccgtattcgtccgtatagtcgttcacgactactttctggcggaacatttccacagcgtagtcgtccgaatccgtcaggtagataatcagattgccgtctttgtccgtgtcgtagccccacatggtgatggcgtggcctctcccttcttccccgacggtcagcgtggttccccagttgttgttgatgctgtttgtcagtttctggtaaacgccgcttctggtgtctccttcccagaagctgtatgcggaaaataaggggttgtcaacagctcctccgcttgaggactgcgggactgtcagtcccagctctttccagtatcctccgggagctgtcgtcgtagaaaggctcggataggcggtggtatccagcatcccgccgttgacccaccagttgtaggcctgttccacggagcctccgctgtttgtccagttcgtggagatggtttggtaaatggccagctgggcgacctgcggcatgacatcgtaagtggcggatttcccgttgggcgtggtggatttcaggtcgcttctggtatcctgccaccattggagaacgttggatgccgccgccgcccagcagatattctggtcataaggaaggtacagccattctgtgggccgtgcggaaaccggaggatttaacgggttggtggggtggggcttggtcccccatgtccatttggtttttttattgcaatcataccatccgccggattcggagacgttttcaaggaatacgggcgcggcatgaagcgttccgggaagtaacaacgccgccagagccgaagagaggaaacggagagtcataggaaaaaggaatacgtaattcctttttttgttaaaaaacagggaggtcgtcaagataataaataggggaaggagacgaataaactccgggaggcagattttttcccgaagacgccgggaacgggatgtccggaggacaggacagatgagtgattttcaggggctgccgttgttaacgggggacgagccagggagaagtgggcgattccggattggacgctacatctgcgggggagccctcggccacgatattgccgccgtgcctgccggctccggggcccatgtccaccaggtagtccgcggcattgagcaggtccttgtggtgttccacgcagaggatggtgtgcccggcatccctcagacggaaaagggctgccaggagaagggccacttcattgaagtgaaggccgctggtgggttcgtccagaatgaacagggcccttttcccgtcttccgccagtttccaggacggggctttggccagttccgcagctatttttatgcgctgggattctccgccggaaagggtgtccgccctgcggttgagattgaggtatcccagccctacgtcctgcatgcttttcaggatggcggcggctctgggcagggaggaaaagaattccgccgcttcgtccacggtcagggccagcgcctgggcaatggatttccctttccaggtgacttccagcgtttccctgttgtagcattgcccgtggcaggcgtcgcagggcatggccacatttcccaggaagttcatatccacttcaatcatgcccgttccctggcaccgttcacaacggcctccgcgaatattgggggaaaagcgcgccgccgtgtatcccctctgcttggaaagggggagctgtgcgtaaagggggcgcagcacctggagcaggccggtagcggtggccggcgtggaacgcggcgttttgccgatgggcgactggtcgatgactacaaggcggttgaagtgctccgttccctgcacgcggcgcggaatatcctttttcccggaaagggcttgcctgaccgcggggatgagacagtcccggacaagggtggatttccctgaaccggaagggccggagatgcaggtcaatgtaccaaccgggatattcagagtgacattgttgaggttgtgtttgtccgctccggtcaggaccagacgctccgcaggagctgtcttgtgtccggaggcgggcatgctccgtttgcctgaaagccattccccagtggggcttccggcattttccagtatttccgcaagggagccctgcgccagaatacggcctccgttggtcccggctccggggcccatgtccaccaggtaatccgccgcggttagaatttgctcatcatgctctacgaccaggactgtgttgccctggttccgtagcgtccggagagcgcggagcaggcggtccgtatcggcggggtgcagtccggccgtgggttcgtccaggatgtaaagaactccggaaaggccgcctcccagctgggaagccaggcgcgccctttgcagttcgcctccggaaagggtgtttgcctggcggtccagagacaggtaggagagccccagctcattcaggaagcgcacgcgtttgttgatttcctccatgagcgggtttaatgccgccgccagggaagggggcgttttcaggcgttccagttctccagccatatcttccagcggaagagccgtcagttccgccagattgtaggcccggtccggcgcagacatggtgacggccagggccagaggggaaagacgcttgcctccgcaggcgcggcacggaccgttttcctgttcattcaggccggttccccggcaggaggggcatgcccccagcggggagttgaaggaaaaatggcggggagtaagctggggcagaaggaagcctgtttccggattgcggtagcgggtgtggaaggcccgggttgaaacttcctctcccggtatggtgatgatggcccgcacctcgtccggattgatacggagagctgtttgcagggaatccgcaatgcgcgaggccgtattttctcctctgacgatgaggcggtcaatgaccagggccgcgtccggaggcgggggggcgggggagcttatttcttcaatatcccgcatttctccgttccagtaaacccgtaggaagccctgccgctggaagtcgccaagcgttgctgcggggtcctgggacagcaggttttccgccggagcggccagaaccaggcgcgtgtgttccggcagggaaacgagttcctccgtaatccggtccgggcttttgcgttccagtttctttcctgtctccggatcatggggcgtgccggcggctgcgtaaaggatgcgcaggtagtccagaatttccgtgatactccccagcagggtgcgggaactctgctgcctggcggattgctccaggcacagggccgggggcagcccggtaatgctgtccacttccggtttttccggttgatccatgccctgtctggagcgtgccgacaggcagtccagaaaacgcctgcgggattcggaaaaaagcgtatcgaacgccagggatgattttccggagccggaagggccgcagaatgcgatgagcttgttggacggaaggtccagatccagattccggaggttgtgctggcgcgcgccgcggatggagatgggaagattcatgttatgcaaggcgtgtaaaggctccctggtgtgagccgccttcctcaatgatgagacggcgcgccgtgatatctcccaggaatttggcgtgccggtggatggtgacggtttcatccgccctaagcgttccttccagagaaccctgtatccagatgttctccacgcggatggttcctgtgaccagcaccgtcgtctttttttccaccaccatcctgcgggcggagatggaaccggagatgtgctggtccgttttgattttgcagacgccgcggcacaggaaatcaccggatgccctgccgtataagaccatgtcacggcattcgatgttcagccctttcagggctgcattggcctgtacggtaacgcttccgcaggtttgcaccttggtccggtgcgttctgctgtgtaaaatgacgtcgtccagtttgatatacgcggagcagtggccgcacctggcggaaactgccgtggcggggacggaagtgattttgcggcaggagaagcattccacctcccgggcaggcgccgggttgctttccgcagttggcgggagtgtccagggcggcgccggggaggggtggctgattttcccagagggcgcggcgctgatccgggggacgggatggaagatggggttcatggaacaaagagggcggcaaaagaacggaccgttcttttgccgcccttgaaagtagcaggcggagagttttttattccgcgtcaatatccagcgtgctctggctggccggagcagggggggccggctccggagcgaaggcatggacggaagccgccttcttggcggcggaagctcctgtagctcctaccgtgggggcgcctacggtagaatggccgatgaagattgcaccgccttcaatagccagggaggcggcctggatgtcacctacgagttccgccgtgcttttcagttccacgcggtccgtgactgttacattgccgatgaccttgccgtggatgatgacggatttggtgttgatttccgcccggatgacggcgttctggcctacggaaagcaccccttcggaggaaatgtcgccttccacggtgccgtcaatcagcaggtcatcggaaaaacgcagagaaccgattacctccacatcggagttcagcacattgcgggtcagctgctggacacgggtggtgggggcgtaggaaggcacggcttccgcaaccggttcgggaatgtcctggctcttggctacatccatccagctgggggtggattcaggatttttattgcccttgggggcgggaacggtagtgaatgatccaaacatggcgttaaaaagagggggtgaaaggtaagatgggagctcttgaaactcgtccggtttaatgtacatcacccgcatgtggatgtgaaacaattttctccggcagggataaaaaaatgtgtctgttttttatcgttgcgctgccttgggcgttccggtagtgtgtgaccgtctttccgcgattgttttctgtggatatttccgttttgaaatgagtgatttatttgaaaaaaagctgttcctttctccggccgcgcgcaggcgcggcggaaaagcgggctttgcgctgggccgcattctttccgtcatctttttcgtgatcgcgctgggaatgtttttcggcggtcttttcttctggctccagaagcgccaggcatccctggattccggagcggccgcgcggatttgcgccacgccggagatgttgtccggagaattgaaagccgctctgaaagacagggtggactatagtttctggcctccttatcacatttctccgatggaaaagcaggacctgctgcgcaactgcctggcggaggcacagaaatatctgagcgccgcggatgtggtgcaaaaatcctcttttgtgtggaagtccctgcaatcgcttcctttaatggtcaggcattacgccatgtctccgcctgaggcgattgtcagcaggcctaaggggcctaaaagctttgccgtgtttgaggtggaggggcatccctgcgcccagctcctggttggttttgaaaagactcccgatatggaattctgttttttcaaggatgaacaggatggttcctggaagctggactggcagcagtttgcccgctttcagccgatgaactgggaggattttgtacggggaaaaggggaggatattgcggaattccgcgtatggatggttcgggagcgcatgtcggaaaataaggatgactacgcatttaagctgattgctcccgggatgaacggttccgaagagcgcagcattgcccggcccatggtgtatgtccccagaaaatcggaaatgggtaagcgtttgttcatgttgtttaagatcaatgaggagatggaacattccccataccgggtgttgaacgccaatgacgaggctgacatgctccgcgcgcgggttctcctttcccgcagcaaagagcccaaccgcaagggggaatattcctttacgctggtcaggctgctgggggaaggctggtacggcctttctttcccggaataaaaaggaaggattgggccggcctcttgctttgcggaggatggggatgcgttttaccggcggtggaaacggggagggggcccttcatgtgggcgcctggggcggtggggccggaaagggggcgggcatggcgtaaggcgtgcggcatgatgtctgcggcagacgcccgccggccagaaagggccgtggtaatgcggcctggggttccatgcaggaacatggcagccgcggtagatgtccctgatgacgtaaatggttgcgcctgcaggggtataggcgtaaatgggccgtccgcatggggaatatccccagatggggaatccggaggggtcatacaggaaaacggcctgccctgccgcaggtacgcggatttcgccatgcaggtgaattccggcttccgcgacgggggaagaaaaggccaggagggcagatatggcgcttccggcgcagcaggcaagaagatggtttccggcagggttgttgttcatcggttttttgaatggtggttgacggcagttatccgatagagcggagtccccgtcccgttttgtgtaattttccatgcccgtcattcagggaaggggtaaagggaataccgtcttgacctggaggggcgccccgggcaaagtgaccgcgtgacgagattcagaccatgcattgatttacacggcgggcgcgtgaagcagattgtgggcggaaccctgacgcaggatggcgtttcattgcgcaccaatttcgtctccgaccgcggcgcggcatggtatgcggatttgtaccgcagggacggtctgagcggagggcatgtgatcaagctgggcccagggaacgaccatgtggcgcgggaggccctggcggcatggccgggaggccttcaggtgggcggcggcatgacgccggaaaacgcggaggaatggatttcctccggggccagccatgtgattgttacttcctgcctgtttgatgcggagggaacgctgcggatggacaggctgaaggatcttgtttccgcagtgggcgcggaacggctggtgctggatttgagctgccgcagggttcagggaggctgggccgtggccatgaaccggtggcagactttgacggaactccgggtaacggcggagacgctggatgttctggcggaatattgcgcggagtttcttattcatgcggcggatgtggaagggctctgcaccggcattgaccgggaactggtggaaatgctgggaaactggcgccgcctgcccatgacatatgccggaggcatcagccgcattcaggatattgacgaaatagatgctttgagcggcggaaccatggatgccacggtggggagcgctttggatttgtttggcggcggtttaatcaggtatggggatctggtggccaggcagcacgggaagtccggcatggaaacggtatgaaactggctctgaaagttattcccaatgcgaagaagagcgaggccgtgggatgggaggaagatccccgtgccggccgcgcgctgaagctgcgcattgccgcgcctcccgtggagggaaaggcgaacaaggtcgtcgtccttttcctgtccgcatggctggacattccccgttcctccatcagcctgctgcgcggggaatcctcccggctgaaagtggtggaactgccggacggatgcgagggaaaacttgcccggctgctttctgcggaggatatttccggagcttaggaaagccgggcggaaggcaggcattttctttatgcgtagaagggttgcatcaggcgcggtccattacgcgtcaaacgtcatccatgtcttagcaggccgttgacgcatccggtaaaagaatttacattgcccgcatgagcgacgaagagaaagagaaaaacgcggaagcggaagagctggaggtgcaggaacaggtgcaggatgctcctgccgaggagaaggtggcggaaccttccctggaagaggaattgcttaaatggcgggataccgccatgcgcactgctgcggaatatgataactaccgcaagcgcatggtgaaggaaaaggaggaatgcgccaagttcgccaatcagcgcctgctggaagaacttctacccgtcattgataattttgaaatgggcatggccgccgccagcgcagatgcctcctccatgatttacatcggcatgagcatggtgaagaagcagctggacgaatttctcgccggcaatggcgtgagcgccgtggagcctgtggtgggaagcatgtttgaccacgccacggaggaagctcttcagcgggaaccctccgaccagccggaaggcaccgttctgcgcgttatccgcaaggggtatatgctgaaagacaggcttctgcgcccggcgaacgtggttgtcgcccatactccggaccccgaaccgcaagtctgaccgtttttttaacattcacgccacatggctaaaaaagattattacgaaattctcggcgtttccaaggacgctactgacgatgagattaagaaggcctatcgcaagctggccttaaagtaccatccggaccgcaacccggacgacccgtccgcagaagaaaagttcaaggagctgggagaggcctatgaggtgctttccgatgcggacaagagggctgcctacgaccgcttcggccatgccgcctttgaacagggcggtcccgctgcgggcggcggttatgccgggggagggttccaggatccgatggatattttcgcccagatgttttccggaatgggcggttttgcggatatgttcggaggcgccggccgcggcggccagaaaaggtccaccaagagacccggttccgatttgcgctatgatttggacatcacgctggaagaggctgcgaagggatgcaccaagaagcttgagattgagcgtctggtgacttgcaagacctgccacggtaccggggccagggatggaaaggaagcgttcaagtcctgtcctacctgccaggggcgcggcatcattacccagcagagcggctttttcgtccagcagtccacctgccccacctgccacggcaccggggaaatcatctcggacccatgccccgtctgccgcggggaagggcgcgtcagggaggattcccacatcaccatccgtattcctgcgggcgttgccacgggcagccagctccgcatcgccggggaaggggatgccggggtgcatggcggccctaccggggatctgcacgtgtttattgacgtcaaaccgcacgatattttccagagggagggcaacgacctgagctgcacggttccggttccgctttccctggctgtttccggcggcaggctgaaagtgcccacgctggaaggcgcggccaccatcaagctgccggaaggaacgcagaacggcatgatcttccgtctgcgcggcaagggggtaaaggcccttcgcggttcggacgtgggggatatgctggtggaggtggaggtggaaatcccctcccggcttaccaaggagcaggtggataagctgaacgcgtttgcctctgccctggatgaaaatcggaaccagccggcttgcgtggagtttgccgacaaggcggcgcgttacctgaagagcaaataaggtccgtttccctttttcagacatggcccgctttttcctcccgccttccgaatgggctgctcccgcctgggagctgcgaggggatgaagcgcaccatgccgccaaggttctgcgcctgcagcagggtgactcctgcatcgtgtttgacggttgcggccgtgcggcccacgctgtggtggcggaacctccgcgcagctccggcgtgctgctggttccgggggaggaatgccctccttctccccccgtggcccatttgacgctgtgccaggctgttcccaagggggccaacatggatctcattatccaaaagtctgtggaactgggggtttctgctattgttccgctcgtgacggaccgcacgatcgtgcgcctgaatgcccgggaggctgaggccaaaaggcagaaatggcagcgcatcgccttggaggcctgcaagcagtgcggccagaacacgctgccgaaagtggcgcttcccgttccctttgcggaatggctgcgcggaggaattccggaaggactgaatattatcgcctctctggcgcccggagtgcggccggtcagggaagtgctggaggccgctcgttcccgttccgtccgtcacgcttctctgctggtggggccggagggggattttacggaccgggagacggccatggcgttggaagcggggtttgttcccgtcacgcttggccctatcgttctccgggtggagacggccgcctttttcggcctggccgccatgcggtacgccctggactgagttttttcatacgcattcccatgtttaaaaatatcattttcgactggtccggcaccctggtggacgacttggccctgacgttggacgcctccaactacgtcttttcccaatacgggaaaccctgcatgaacagggatgaatttcgcgcggaattccagcttccctatccggactattatgcccgggtgctgccccacgcggatctggatgaactggaagaccatttccggtacgccttccgcgtttccaatgctccggtggaagtgctgccgaatgcccgggaattcctggagttctgccgcgcgcgcggcgtgcgctgctttattcttaccagcgtggacgccaaggagtttgatacccaatgcagggagctgggcatgatggaatattttgaagccattcatgcgggcatccgccataaggatgcccacattcataccctgctggcccagcatgggctgcatgcccatgaaaccgcatttatcggggacatgcagcatgatgtggaaacggcccatcacgcaggcatcacatccattgccgtcctgaccggctataatgacgctgcgcagctttccaaggccaaaccggacatgattgttccggacctgcttgttctgcgcacgctgatgcgccgttacgcgctcccttccgatacgcaggattccattaacatcaacggtcttgaactggataccttcatcggcgttccggacgaggagcgcgcttccatgcagaccctgaaagcggacatcactttttatccggaggaggccttgtccggactgaacgatgatttttccagaaccgtctgttatgattccatggcccgtgcgctccgggcggaggccatggcgcgtccacgcaagctggtggaaacgctggcggaggatatgggaaaggtttgcctgaaggaattcggcgcgcggcacgtggttgttaccctgcgcaagtttattctgccgcggacggacagcgtttccgtaacggtgcatgtttcccggcaccggtaagaaagaggttttctaccggatgtccaccgccttttcctcagggattttcttcccgtctttggtgaaagtgtttttctccgccttgacgtcaccggtatggcgaatgcggatggcggttccgttcttgaggtcaaacgtgtttccggtaatggtgatgttccggtgaacgtccccttccggccgtggagcgtgcggcacgatctggatgacggcttctccgcattggataaaggtattgcgggaaatggtcatgttcctgaccacgccggattcataccagccggaggcgtcatcttccaccaggatggcgggcatgcccgttttttcaaaccggcaccgttcaaccagcaccggcttcctagtggtgagcaggaagcccctggtgggaatgtggcggcataccgtattgctgatgtggacagacggcgtccatgtgacgttttccacaacatcgtcaggctggatgttcccgggattgggatgttgcaatgtaagttctatttccttttcattgagttgtttgacgccggaaacggtattggatgcataaggcaccagcgtgttgcaggaaacataatcgatccggtctcctgcggcaaaggcgtcaaagccgaaggtctggggatgcatgaaccggacggtgattttgttgggggccggcctgtctataatgcgcaagtgggttccatgaacattaacggcgtcgtcatgggaggctcccagcacgcaatccttgacgatgatttttccccggcatccggaaaagtgcagattatccgcccaggaggaattggtgcggagggaacgggggcgcggggctattttcaagtggctgaacatgatgttctcgcagaactgggaaacgacgcccatgccgtgcatatagtaaatatggcagttattccagaggatgtttttgcttctgtattgaaagaagccgcagcagtccctccgggtattgcggttttggtaggattggcccggtttcatggttggtgagccttccttgaacgtaatgctgatttttccgggagacaattctctgatgactgttttcccggggtcgaaacggccctggaaagtgccggaggcggaatcgaaaattttggaataccctcccatgcggaattcccagccgggtccgtgccaggtcaggtttccatccttcactgtgtacaggattccgtccggaatagttgctttcatggtatccccttcaacttccgtgaccagaaattcccccatggtcggatgcaggtaatcaaaccccaggccgttcagggaaacgttttccgcatgttccatgcagacaaagatggcttttccttccagcaggatgtcggtggctcccggctttccctccaggcgtatgtttttggcttccatcaggcggatagccatggccttgggctcgttgggtgcatcgttggtgttggaaatctgcggttttccggtcatcagggcaccgtgtttgaagatatgcctgccgggcatgaaccggatggtgaccggggcctgtttggaaccttcccccatcagcgccagggagacggcatgttcccccggatggatgacgagcgtatctccccgcgccatgatgagacggttggccggcgccatgcttttccacgccgtggatggggccgttcccggattgccgtcatttcccttgtccgggtctatatgccagacatggtttcctgcggattgcgtgcgctccgtccgttccggataatccgctgccgggcatggccctgtcaacattgcgagaataaaaagcagggaggccacggggttttgcatgctgcaactcctacaggaacacggttttcgggacaaggataattcttgcagggccgggggaaaaagccgcagcttttccatggctcacttgggaggcccctgtttttcatcctttctgccggggcgggaaagaaagcctaccagcttgtcataatacgctttggatttgtcgtagtaggattgagggtcaatatccagtttggtgcggaacaggagccagagcttgtggaaggtgttgacgcggtagcggatgtcgaaaatacggaagccgctcgccttcattttgtccagaatggtatggtaaatgagtgccatggcctgcgccggaataagggcggctttgtcttccgggctgagaaggttgtattccctctccgcttccgcaaagaaagtttccgccagatccgcttcatatttcagcagctcctgaagccggggggaatacaccctgcagcgcaggtcttccagggtgtatccaaagcggtccatatcctccttgggcaaataaatgcggttggacttgccgcagtcttccgccacgtcccggatgatgttcaccatttgaagggcatgccccagggcaatggcgtacggataggaggcttctcccgcccccatgatgcgggcggaggtgaggcccacgcagcaggctacgcagtaggtgtagtccagcagttcatcgcggctgcggggctgctgctggcagatgtccgaacggcagccttcaatcaggtgcagcatgggagtggtgtccagctccaaatcctggatgagggctatgatgtcctcctccagttccgtcagttccaggccttctccgccgttgatgacctccacccagcggttcaatgcgtcgtggcgttcgcggggagtcatgcccggttcgtccacgatatcgtccaccgtgcggcagaaagcgtaaaattccgccatatggcggcgttcttcttcaggaagatcaatgagggcaaaggccaggttggacttggccttgctggtgatggtttgggcttgagtcatgtcttgacggaaaaaacgtgcctgcgaaaaggataaaaatcatggaataaggccccagtgggaagtaaagggccacaggcagaagctggcggggcctacgatgttgtactggcggacggggccccagtaccgggaatcaaaggaattttcgcgggtggaattgtcccccagcgccacgtattcacgcagataggggcgtttgctgtcgttggacagatgaacggttcccccttccgtgatgtaagctctgccgtccagcaggctcaggggggcgggaagggccacgtagccgcagggctggtaggggggcttgccggaagcgaccctctggatagtccattccgtggctggtttcccattgacgattagctgggagtcctgaatggagagggtatctcccggaatgccgcagaggcgtttgacgtagtgggttcctccttcctggccggtgctgcttcccttattggcgatgccttcgatgccgcgtgtatcaaagacgaagacttcccctcgttccggcttgcggaagtggtaggccattttattcaccactattaggtccccggcgtcaaaacgggcattgacgattgtgtctccgggcaggtagcttctgaacggggtgtgccgttcggcttcaaagcgcggttcctgattgaggaagtagcggcgcgtttccgcttccgctgccggaatttccagcttggagccgtcatcgaaaatcacgttggtcaccgtgagcagaagatacttggtggcaggttcgaaacggacgattttcttttccttggaggccgtttcgtgcacataggagccgccgtacaggatcatgtccccgattttctgcatcagggtgggatccccttcctggggaagggcgcggattccgttcagggagggctgcatggaaccggtcgggatgcggaagggctggactacataacagcgcaaacccaggaaaatggccagaatcacgaacagaacttccacgttttccgccagggcggaaggaatcgctccggggatggattccagcgtggattccagtttggcggtaatggtttccgcctgctgcctgtcaccccggtaaagggccgttttcagcaggtcgcggctttcttcaaactccgccaggcgttcgggaggcagaagatcgcgattgtagttgatgtagcggcgcactgctttcagggccatacgtcctttccggcgccatttgggcgtgaaccaggccagaggatgatccagaagaaacaccagaacggcgtttgcagccggaaagcaatcgtaaagggcagctaggatggacttgtgcgggctattcatgaagtacggcattcatgatgccccgtccggaggcgtcatggaagtttattttacgttacggaagccccatttttccaggattcagcaaattttttgggtccaaggcggatttgaccagttcgtgcaggtggtaggcgccttcccccacggctttccggaaccatttggccttcgccaggccgatgccgtgttccccggtaatggcgcctccgtgtgccagcacccagtggaacagcctgtccacacaggcgtccgccagggctttcttctctggattcgcataatcgtccaccatgatgttggtatggatgttgccgtccccggaatggccgaaacacgcgatgtccagccctgtttcccggttcagggcctcgcagaattccaccagggccaccaggcgcgacctggggatgacgatgtcttcgttgagcttggtcattccggttgctttcaggctgtaggaaaattcccggcggagttgccagatggcttccgcctccgcttccgtgtctgcgcgcagaattccggtcgcaccgcattcttccagcagggtgcatagggaatccagttcctcccgcacggcgggccgcctgccgtccacttccacaatcaggtggccgcggcagccggaaggcagggcgctgtcccccagatagttccgggcggcgcggagagtgaaactgtccgttatttccagggcggagggcaggtgcccgctgttcaggatgcgctgcacggcggcagcggccagcgggaattgcgggaagccggcgctgagcgcgccgaatgcttccgggtgggggatgagcctcaaaacggcccgggtgatgatgcccagcattccttccgaaccgataaaaaggtccccgatatcgaaccccgtcttgtttttatgggtgcgtccgccgcattccactacctctccgctggcaagcaccacggtcagccccagcacgtaagctctggtgactccatatttcaggcatctggggccgcctgcgttcgtggcgatgtttcctccgatgctgcattcctttctggaggccgggtccggcgggtagaaccatcccagagcacgggcctcccgctggagatccgctgtgataactccgggttccaccacggcaacgccgtcttccggggatatctccaggatacggttcatccgttccagggaaaggctgatgcctccgcgcacgggaacgcaccctcctacgtatcccaccccgccgccgcgggccgtgacggggatgttcatggaggatgcgtagcgcagcaacagggagacgtcctccgtactttccgggaaaacgactgcctccggcagcacggaggcgtaccatttgtccccggcgtgcgccgccagcacatccggggctccggaaacttttccagaccccagaatgcgggaaatgtcttctttcaaagacatggattatttgagaatgggggtgcagaagcagtccgggcggtggaaatccggattgccggaaaggtcgtccgccgtagtcaggaaaatctggtccggagtatccaggatgaacgtggctgccagcttgcagtcgcggatgtccacgccgcgcagttcgttcagcggaatccgggccatggcgcaccatccctcgtccgtcagaatgcacttggtatccacggccagcggagcggggatgtcctcattggcgcggcgggtatcggaaaaggcgcaggcccaccatgcgccgttgggcgcaaggttgaattcccagtaattggtgccgtctcccgcggccatgaaccattccgccaagtcgtaccgccatagttccggctggaactggccgggacgggcttccggatggatggtggctgccttgctgcgggaagccagaaaccacaggaattctccgtccgtggcgaaggagaattccgcacttggctccacatcatagccgaaccagtcgttgacgagttcttggcggggcagggaggcaagctggtcgaagcttccgttgaaggcccattggtgaatgattacttgcataccaccacatttggacagttttcaggttttatcaagccagaacgtcttacaggcttggatattgacgtgatttctccatcatgggggccgtcatgcattttcaaaggacgctgaatcggttttcccgcgaaaacgttcccgggtatctggctgtgttcatcggcggtttcggggacatgtttgcgggttgtttgagccgtgtggagaaaggatttcccggtttttttccgggtgtggcgtacgcaacggcttattaccactgggacggaggcggctgcggcgtgttttttgacaggtgcggaaaaatagcggtggagctggaagagctgagacggagatatcccgggctgcctgtcgtgttgataggacacagctacggaggctcctgcgcggtggaagtagccaggcgccagtcggttcaggctgctcctctttgcctcctgacggtagatgccgtggcgcgcaggcaaaagagcgtgcgtccggcctgtgtggaatggtgggggaacgcttacctgcgggatggcggcggcttcatggacgcggtgcccagaataggcggacgctggggacattgcgccggggctgatgccaatcttgctttttccggctacagtcgtgaccgggagggccgcctttattctcaccggcgtcctgcgcccatgctttatgagccgcctggggaagaagcatgcagcctttttcaagccgctgcctcctggctggaaagaaatcttccggactgaactgccggagccgtgctaccagttcagttcatcccacttcaccagttgggaaagaagttggctgataaggcgttccgtctgttccctggctttctcttccggcactctgatcttgtccccgtacgtggtggaaatttggaaatagcaccagcgttgatccatgccgtgcagaaccctgtctttcatatccatcagggtgcggatcaagtggtcttccgtcatgtggcggtggccgataaatacgtaataatgcatactgtccagaatgacaggttgcggatggtccggagcgatgttctgctgggatttcagcttggtcattctgatggttccgcggccttccacgggaacatccaccgtggtccccgtcaggttaaaatggccctgggccgggaggcagcgttccggacggtggatggagttgtttaaatcatgaccggatttcacgatggaaacgcggcacagaacgggtacggtttccgtcgcatccagactgatggggagttcctgcacgtaatccgctttggaaaattccgtatccggggccaggatgccccgttcctgttcggattcctgccggcgcgtgccgtgccagccgtacggattcatgcctgtggggagatccatgctgatggaggagtcctgcacttcccccctgcgcggcatcaggtaagtgccgccgagcatgacggccagcagaaaagggatgatgataattttgagcgttttaatattcatggcggcggaaacgcttaatgggacttgttcattttaacaaccagcttcttgcgctgtgacggcttccagatgagctccccggccagcagggagtggacggctgccaggccgaaaaggctgatggggaaaaaaaacagcaggccggaccagtcatgccaggtttttgacgcaaactcgggatttccgtattccgccatcaccacgatgctggtgatgcggacaccgttgccgatgacggccaggggaatcgcgctgaggaagagcacgcattttttccagaatttcaagtcggacaggtaggcccaggctgcggacagcatgagcagtgccatcagggaacgcatgccgctgcaccctcctgcaatattgaaggcatcccagtgtccgccggtagagcggatattggtgccctgcagataggtatccaccccgaagatgcttgccccccaatgccccagctccgtcgcgatgatttgaagtcccaccgtagcctgctggaaggagggcagggggatacacagccagaaaaagagcagcgggaaggcgcacagcctggcggtctgcggtccggccaggtaccaggccccgcccagtaaaatcaggggaagagcgcctacggccacgcgaggctgccccacgcggaaggaaagcatcagaagcatgatcgccgggatgaaaagaatcaggccgcgccagtccatgcgtctgggtgcctgggcaattttctttctggcatggtacagcatgaagacgatgatgggcaccaccagccagccgtgttcataatccgtttgcttgttccaggaggaaatgagccactggatgctgttttcgtttccgaatgaaccgaattccgggaatgccagatagttcagtgccagcagcagcgtgctcacggccagggcggcgatcatgggggcggtcagaaatctctctttgccatcaggtgcgggggaatccatcatggagaaaaatcaaattgtgagaattaagtattgcgattatgcggacctgtgttcagaatgcgtccgcttttcagtttccggtatgaagattatcagcggtacagcacacagagaacttgcggagcgcattgcgcaaagcgtaggcattcagttgacgaacgtcacggtgaatactttccccgatggggaaagttttgtaaagataaatgaaaacatccggggcaaggatgttttcctcattcagcccacctgcccccccactaaccataatatcatggaattgtgcgtgatggtggacgccgcccgccgcgccagtgccggacgcatcacggctgttgttcctttcttcgggtatgcccgccaggaccgcaaggaccagccccgcgttcccattaccgccaagctggtggccaatctgctgacggccgccggagtggaccgcgtgctgactatggatctccatgccgcccagatccagggattctttgatattccggtggatcacctgtacgccgcccccgttttaatccgtcacctgcgcgaacattatgttaaagacctcaagaaactggtcgtcgtctccccggacgtgggcggcgtgaaaatggctcgcgcgtattccgacgctctgggtgcggaattggccattgttgccaagcaccgcgtcaacgccacccatgtggaagccatgaatgtcattggtgacgtggaagggcgcgatgccgttctgattgacgacatgacggagaccgccggcaccctgtgcgctgccgccaatatcctgaaggaacggggagctcagcgcgtgttcgcctgcgtttctcatggcgtgcttggggacatggcccgcgaacggatttccggttcctgcattgaacgcgttcttacctccgacaccgttcccatggcctatggccccaaagtggactgtgtcagcgtgggagacctgctgggccatgccgtgcagcgcatacatgacggagaatccgtatcatcattatttgacatttagacaattttagtgcagagtcctgcgccctgacctgagtaccggtttacgcgggttcggaaatcccggcggggcctctgcctgaacccgattaggaaacatcatcaatcaacactcaatattgcctctataaaacatggctacatcccattccctcaaggccgaaacgagagcctgcggctccggtaatctgaagcaactccgcagccagggcctggttcccggcgtggtttacggtcccggttttgacaacgtcaatatccaggttgacgcccgtgaatttgcccgcatgctggcttccgccgtttccgaacacatcctcgtggccctggatatcaacggcaagatcgtgaaggttctccttaaggaagtgcagcacaaccccatcaccaacgcctgcctgcatgtggattttcaggctgtgaccgataccacggtcatccattccattgttcccgtcattctggaaggcgattccgccggcgtggccctgggcggcgttctggaccagaccattcacgaactggcgattatctgccaggtgaaggatctgccggaagccattaccgctgacatttccggtttgaaactgggtgaaagcctgcgcattgccgatctcaaactcccctccggcgtaaccacggaactggccggggatgtgattgtggctattgtggaagctccccgtgtttccggcgaggaagcggctccggctgctgaagaagctgttgccgagaaataagtttgatacgcctgtttcttcttttaccgggtccggagccgtttttgcggctccgggcttttttttgtcgccaacagggcatcttttggtaaagtgcaggatacgtatttgcctgatcaatctggaaaaagccttagatttatgaacaagtccctcatattggtgttgaccgcattcgttccgcttgcagctgcagatgaagtaaaactcaaggatggaaccgtttacaaaaattgcacggtagaagtggaaacgccggaaagcgtcagcctcctggttcccgtgtccggaggtatcaaggattccgtaaccgtgaagagggatttgattgaatccatcaggaaggcgactcctgatgaactggaggctgcccgaatcggcaaaatgtatgccaaaccggaaaccatgaatgccggggatttggaaaaagccttggcggacctggacaagaccattaagaaaaatccccagggccttgctcatgacgccgccgtcaaggcaagagccagagtagtggttttgctggaggaaaagaaattgacggaggaagcccaggccgcccagaatgccagggaggaggcggaagtgaccgtgcgcaccaaatacgaccatgaggccaataagctgctgaagcgtttcaaggcgcttgccgtgcgcaatccataccaggccatggccgtgtatgaccgcttgcgcgacggttatcccggttccgccgccctggcggatgcctatccggatgccgccagaatcgccggacagctcaaccgtaagctggaggtcatgatcgccgccaaggaaaagtccttggagaaggaacgtgaagccctgagaaaggaggaagagaagcgccggggaaatcccaaactgaccaaggaacagcgccaggtgttgatggatgctttccagaaaaggcagactgccatccgggaacgtgaaaaccagctcacggaagtgtaccgggctttgcgcaagaaggtcaaggaacgcggggaccggtggtttgaacctacggcaggttctttggaagccatgagagaccttaagctggtagccgctacggatgcggaacgcttaaaaaaacaggacccggaaaacggagccggttccgctgcgctggaaaaggcctgggatctgtgtgacgagaaaaaatttgacgaggctatggaggttctgacggaactccggaccgcccaggttcccagggaatactatgaggaactgacggaaacggtgcgcgtggggttgcgggaacagcgcgcccgtgaacgcgccgaacgtgcggaagcggcgcgcaaagcccgtgaagaccgggataagaaacgccaggaggaaagagaggcggccgccaaggccaaaaagaaataattctgccgttttccggagaaaacgctccggaggaatatggcggaaatggcgtttacggacgggatggattaagtatgtgttgattccatcctgcccgtcaggctttccggccgttgatttcgcgcaattcgttgtcagagattcctgaggtttttctgtcggagcggggccggaggcgtgttcctttgacggtctgcatgtttttgcggggagaagagggcaaatctttccccatgcgatatttcctgctttcttccgccgcgtcttcagtatagaagtgttgcatgaggaacgcttcttgcaaacgggtcacgggtgaaacggacatcagcatggaactgaacctggacggcacgggatgcgccgccgtcgcaacggggcatgcgttttttgaccatatgctggatttactggcccgccattccctgatggacctgacccttcaggcccgcggagacctggaagtagacgcccaccacacggtggaggatgtgggaatcgttctgggggaatgcattaaaaatgcactgggggacaaaaagggcattgttcgctacggctgttcctacctgcccatggatgaaactcttacgcgcgtggtgatggatttgagcaaccgtccgtatgtagctttccgtattccggaaggcggtttgccggatgcccccaactttccgctgaccctttgcgaggaattctgccgtgcgctggccaataacctgcgttgcaacctgcatgtggaagtgctttacggcagggatggccaccacattgcggaatctgtcttcaagggcatcgcccacgcgttgcggcaggctgcggcgattgacccccgggccgccgggatgctgccttcaaccaagggaatgctgtaaaatacatgaaacttggcgtgattgattacggtgcgggcaatctccgcagtgtgctgaacacctttgaggccgccggcgtgaccggtcatctggtgcgtactccggaagatgcggcgggcgtaacccatttggttcttcccggcgtgggcgccttcggcgactgtgcggaaaagctgcgccgccagaatctggtgcccctggtccgggcatggatagagcaggacaggccttttctgggcatctgcgtgggctatcaggttctttttgaaagcggggaagaaagcgggcaggttcccggactgggcatcctcaaggggcgcgtggttcggttttcagaatcggaactcaaggtgcctcacatggggtggaacagcgtggctctcactgatccctccgatcccatctggaaaggcatggggaaggaaccgtacttttatttcgtgcattcctattatccccagccggaggataaatccctgattgccgctttctgcacctacggcgtgcgttttgctgtcgctgtcaggcgcggcaatctggtcgccacccagttccacccggaaaaaagccagaaactgggcgtgaaactgctgaaaaactttatttccctgtgagccggaaattgccggctcacagactgacggctctttcttctgacagcagaagggcaggaggaatgatgaatcaaatgaagcgtgattctcgaaaagcagccttattaaaaagacgccgggattaattcatttaagttattaggacggcgttcccccgtagagctccatgaatcagtttttcccctgtatggggaaaggaaagtggtcgggacatgcggagcggccaattggcctcttatcgccggttcctgatcaatattgctttagaggcgggggaatattggttgagccggcagcttttcctccagaggggaagggagggtagtacataagaaaaaagaaccgccccttcacgggagcagttctttttggtgaaaagcaaggagcggaaacttcgtccgcatgggcctgatttagccgagcaccttgtaatactgaaggtgaatctggggattcaggcgaaggcgttcgcggatgggcctgatggcggaaggttccgcagagaacgtgtaggtcacatactgcccggcggaaaggtggttggattcgtaggcgaattcgcggcggccggcgttttccgtggcggtgatgtcggcgccttcttccttcatcgcggcggctacggtgctgatcaactcttcaacgggagtttccgtacccttcatgttgaatacgataagagcttcgtaatttctcatggtcttgtgataattagaaatgtgtcgtgcgaacggtgcgcaccttgcgggcaagtaaggtgcaatgattgtcttcagaaagcaagcctattttttaccttgtttccgggaacatgccgtttcctgcgttttactctccccacggcgcggaagaattgttctgcatggcgtttcctgccggcggcctttgctgtaggagagacgattccggcgttcgcttggcgggtgccgtacggaaaagagtggacgccgcaacttaggatatgagcttttcccgggtaaaggattccttttcctgcaaaaaaagggaggaactggcgggaggcagatccgctggagcggttgctgccacgggctgaagggctttgttcccctccggaacagctttgtcttgcgcagggtatggcgggaagagctccggaaagaagaaaaacgttaacgcgtctgcgccatctgtacggccagctggaaagcgtggatggtgctggatggattggcctttccggttcccgccaggttgaaggcggtaccatggtccgggctcagccgggggcggggaaggcccagggtgacgttgacggcggtatggaagtccaccagcttcagcggaatcagcccctggtcatggtaaggggccagcacggcgtcataattcccttccacggcatcccggtacacgcagtccgggacggaaggcccgtcaaatgcggcatccggatggatcgccctcagccgttctacggccggggcaatgatgctcccgtcctcatcgccgaaagcgccgtgttccccggcgtgggggttcagggctgccagggcgatacgcgggcgcatgattcccttgcggatgcagaagtctttcagcagggttccaatgcggaccagttcctccgtttccagcagggaaggcacgctttggagggaagtatggatggttgccagccccaccgtcaaccgtttcccggtcaggcacatggcgtaattgtccgttttcaggcgttctgcaaagaattccgtctgccccggccagcggaaacctgcctcatgcagggtttccttgcagacgggggcggtgacgacagcgtcaaccgttccttcccgcagggcatgggccgcctgttccagatggtcgaaggcgtgtttggcggattccgcgttaggcctgcccaggggaagctccactctcttgccgatgaggcggtattccgcgtcttccgggagttctccggaggcaagcgcggcgaaaatgacttcagggcctatgcccgactggtcgcccagcgtgtatccaatgaccggtttcatagtgcggcaacaggagggattataattccgcgggttccggcattccggcagcggaagcgggaatttcttccgcggaggaaattggagttttttcccccggaacagcctgcagggctgccgcccgtttttccatgttgatgacctgtgtcgttttttccggttcgtcggggttgcggagttcgaattccaggtgggagttggtggaccagtggtaataaatggtggcgccgagggctgccagcaccagaatcaggagaatggaaccgaagaaggagcgcatgcctctactgtgtgccggaggaaaggggaattcaagaaattatcaagaccgcctgcgtgggcgggcaaacgccgttaactgccgtgtatcttcatttcctgaaagaggaaggaagcgtaagtaaaaagaggcagcccggcatgagaagatccaggacagttcaggacaggattttcatcgcgaggaacaggagcatgagcaggatggcaaagccgatgattctgcccgccatgctgtcgtctttcccgtcctggatgcacatcgggcagttttccgggccgttcatgccgctgcatcccatgccgcacgcgccgcagggaaaatccgcctcccgctcctgtactcggtcttggagaaggagttccagctcgtgcacggaaggttccacgccatagacgacgatttccccgtcaatggcgagtgcgggaagcggcgtcccggtctgttccggaacggtctcctcaacctgcatctccggattgacacccagatgggccaatgcctggagggtattggcgcgcagggtgtttcccgggtaggcccggctgtaaaaaagctgaatcctggtcatggagctgggtatgtcaggaacgcttccgtttgggaagactcttcttccaacaaataggacgggcccccaaaggtcaatgcgtttttccgtgtcatgacatataagtgttgtacggaaaacattttagacttttcaaatgaggagggaacgggcactatcccgccggtcccgccatgaaaaagctatctctattccttttgaccctggcctgtgtattccagttttccgcccaggcacaggaacggcccagttatattgccattgaggccaattccggcaagcttcttttcagttccaacgcagaagaaaaaaggcccgtggccagtctttcccaagtagccaccgccatggtggctttggactgggtggcccgcacgcggttgcctctggatactttcattgccgtgcctcaggaagcgttcggcctccgtgcgggcaatcccatggatctccagccgggagaccgcctgacgctccgggacgctttgtattccaccctgctgggttcggacaatgtttccgccctgactgttgcctcctttgtggggcgtgacctggtgtcccgccggggcggcggcgcccccattgccgcttttgtggcggaaatgaacaatttggcccgttccctgaggatggccaaaacgcactttaccgctccccacgggctggacgccggcaactccgtttccacttcctgcgcgctggatatggccttgttgggcgtttacagcatgcaaaatccggctttttgctacattgtttcccaggcgagccggcgcattgaagtgcagtcccagaccaagggcaggacgatgtatgatatttccaacaacaacaggctcatgagcgcttccggcgtggacggcatcaaggcgggcacttcccgcgccgccggcccctgcctgctgctcagcgtgacgcgcaacgctatttcccgccggagcccccaaacggggacggaggtgatttatccgcagcgcatgattattgcggtgcttggttctgcgagccgctattccctcgccagggagatgatgaacactggctggcgcgtttgggaaaactggcaggcttccggcatggacatgaaggaccccaaggaatttgtccagcttcctgtgaaatctgctccacaaaggagataggaagtagacggggaaggatttttctgctataaggaacgccgaatatgaacatcggtgttttgaatagcgggggtgactcccccgggttgaatgcagttattgaaggtgttgtgggcgcggcttcccgtcgcggctggaacgttgtgggtttttacgacggttttgaagggcttttgtccgaggaaggggacgaacggtttgaatggctgacccctgccgcctgccgcggattgcgagccaaggggggcaccattctgggaaccgtgaataaaggcaactttgctatcaaggtgggcgtggaccaaaagggggcgattgaacccgcggtgctggaaaaaacgaaggctactgtccgccggctggggctggatgccctgatcgttgtgggcggagacggctcccagtccacggctcttttgctttccgagatagggctccccgtagttggcgtgccaaaaaccattgataatgacctgggcgcaaccgatgtcacttttggcttctacagtgcggtttccattgtttccgagtctttggaccgtctggaaaccaccgcgaacgcgcaccagcgcatgatggtggtggaagtgatgggacggcatgcgggatggattgccttggaaggcggcatcgcagggagtgctgatgttattcttctgccggaaattcctttttcccttgaaaacgtggtggaatgcatcaaggcgcgcaaggctgccgggcagcgggaaatcctggtagtggtatctgaaggggcccgtctggcggacgaactggtattgctggatgaaaagacccagggggaagttcgcctgggaggcatcggcaaggtgattgccaagaaactggaagaagctactgggattgaaactcgctcctgcgtgctgggccatatccagcgcggcggttctccctgttcctatgaccggattctgggaacgcggttcggcagttatgccgtggaactggtggaaaagcgccagttcagctgcatggttgctctccgtgggacgcagatgactgccgtacccattgaggaagctgtgaaaaccttgaagctggtggatcccgattgccagctggtgcgcacggcccgcgatttaggcgtatgcttcggggactgacgttctccgtctgagtcacgggaaattgattgtacccgatagggttttgattgcctttcaaccgtatcctggaatcaggatacggtcattttttgcggaagcacgccgtattcattggggcctggcgagcttttaagaagcatcatggacaggaagaggatggaaagcaaatccatcaggctggacaccattcccaggtagtccagatagagggccatatcttccggtaccaggcgcagcaggaaaatcagcaggaaagtgacgatgaaaataagaatgggaatcaggatgaattttccgctcagattgctgtcatgcaggcggcgcacggcgaccggcagattgaagaggatattgagccccgccacggctgccagaagctccagggaaagcatgctcagctctccggattggtagaaaaagtaaaaggtgggattgaagcaggagtgagccagcaggattagagcgtcttgcggatgggcggcatataacaggatttggagggaaggagagacgtaaaaacccgccggctggctgtcaacgtctatcatgctgtagcccagcggaaggaataggaggacggaaaggaggaaaaaggaccagaattctgtccgggacgcgcggcctgccaccgtattcaatttccgcaggctgatgagccagtaaaggtaaaacggagtcaatggctgttttttcagttcttcggcaggggaatcagccggttggggctccggacggcggctgtatttgttgccgtccgccttgctttctcccagcgtcagataaaaaaagatcagatgccccagcccgaagggaatgaaaagggaaaaaagccagagtccgctcctgccagtatcatgcaggcgtctgaacgcggctgatatgcttgggatgaacaacaccgcccacaagaggatggttaaagcgtctccgtagatgctcagtcttgtatcagggatgtgcagccagtccgtcaggatataccccgccagggctggaatcaacgccaggaggggaagagccatgaaccaccagaattccgcacgggaagcgcagccccgaaagtccgcataatgacgaaaaccttttttccagaaggagaggggagaagggagggaagattcctgcgtggaggttggaggaacggaggaaacagcaggagaagcaggagaagcaggagattccggcatggatgagaagggggtttccgtttagactccctgatgccggggaatgctcaatgcgtctgtgcccaggacatggaaattttcctcctgcagccggttcagatcaggacaatcgccatcagcagcattccggcgatgatgcccatgatggaaatgtgatgatgcccccagcgttccgccatgggcagcagttcgtcaaaggagatgaaaaccatgatgcccgcgacggaggcaaagagaaccgcaagtacggtaggtgtgaggaagtggaacaggaagaacatggcgatggctgcgcccaccggttcagccagaccggagagaaaggaataaaagagggcctttttacggctgcctgtgccgtagtaaagaggtaccgccacggcgattccttccggaatgttatggacggctacggccagggcaatggaggtgcccaaagtcagggagtccaatccggcggcaaaggtggcgattccttccgggaaattgtggatgccgatggccagggcgaacagaatgccggaccttttaattcgggatgaggaaaattcaccgctggcctgtccatggatgtcttccgggccgcgcgcttcgtgcgggttttcgtcttccggtaccaggtaatcaatcagagccgccacggcaatccctccgaagaaggaagcaatggcgatccaggaacctgccgtatggccttcgaactccatcaacctgtgctgggcttctcccagcagttccaccagggagatatacaccatgactccgccggataatcccagggcaaaagtaagtgtctttgtatccgtccttttcatgaagaaggcgatgaagcctcctatgccggtagcaagaccagccagcgtggtgagcaggaagacaacgaggatgtggtcggcggaaaggtccatgcgtgcacctgccgggcagggatgaccccggcagtaaagaaagggttgtattatttcgcgggagccgtgggaacgatcatcttcgtggcccggatggcaccggggggaagggggggctcttcccccggcttcaggaggccccgttccttcttgatttcaggcagcttgtccagaagtttgccgaacgcttttccttcaaaactttccggaaggagcgcgacgccttctttgagaggctgttccaattcattgaccctgttttgctgcatgagcaggtacactttttgcatgagaacggcttgttttacttccggaagaagcccgttctttttcaagtagctgtccatgatggaaagtgcttcatcaggattttgatctgccagaatgtggacgtttttcttccggaacgtatcggtccattccaatttctgggcatggagcagatcgtccctgtgcagtttggcgagaattccggaagcgtcctgcggatccagtttttccagttctgccagagccggtttgtagaaagtgcggatgctggattggggaaccgttttcagcaattgaaccagcgtgtcccgccgctgctggtcagtgagtttttccgccagcttgtttgtcagggactgctgcgtgttgagtgcttccgccgctttttttgtatcctgcatgacctgggcaggattggcgtaacctacgacggtgtggacaggccgcccctgggcatctgcaaacaccagcgtggggaatccggtgatgccgtaggattttttataggtttccagagaagtttttgtctgcgcgtcctgctgctttttacgtgggtagtccagttccacgggaataaaggaacgggaaatggctgtctggatttcgggaagggaaagagcctgctttttctgcatgatgcaggctccgcaccagtcggaaccggtgaattccagcattactcccttattctgagcggcggcttgctgcatggcttccgcagggctggtactccatgtttcggaggcgccggcactccaggcgaggagtatggctgcgaggggatgtatgattgttttcatggcaggaatgtcattattgcatggggggaagcggagaatgggcggggggaacccacatgtttccggaagaggagctgccggaatctccggtgtgggtgggtgtttcaattttcggttttccggcgggcggatccagatcttccaccaccactttctttttggcgggctggggcacgggggcggcagccggggccggtgagggctccctgcggataacgggggctttgagggatgcgtccgtctggttcatggccgtaatattcagcgggtcgccgtaggccagcatttcccggatgtcgtcgggaagatctccggcaggaatggaggtgcttccctgttcgtgcatgatgcgcacgaattcattttccacgcgggtgatttccacattcaaataagttttgcctgaatgggatgtcctcagaatgtcgaacttgcggccgcgtgccttggctctggcgtgttggcggtagcgttcgaagtaggagcggatttctccccggatgccggctacgcgcattttctctttctcaatggatttttgcgtctcttccaggtcggaggccgtatgttcaaagatatccaaaaggctgagcagctgttccttgggagcggtcctgttccgtatttccctgagctgttcctgcttcttcagtagctgggcatgattgtcctccaaagcttcccgcgcatctttgacggggtccggaagctgggaaaatttttcataaacaatgtagccggcactgatgacgataagggcgaacagccccaggcagagattccagaaaagagcgtctcccctggctttccgttcggaattctcctgccgggcggattcttcttccgcggcgtgttccgagacgacgtccagggaggttttcagacgttttttagctgcgggagcggagttttcatccttgtgttctcctccgttctccttcggagcgaagcgggtttcgtcttccgcaggggggggagtttcgccggacggctgtctgggagcgggggcgtcggtcatgggatgcgcgggaatggaggttagtctaccgggtgggtttgtttgaattcagccagtttggccgcatacgcattatattgatattgcagggcatggaattcctgcttgcgctgcgccagcgttttgcgcatgtcttcaatgtcaaagcacaggtgctcaaagtcgcggcgtttggagggcaggacatctatatccttcaccgtgaagggcgtcgtgattcttcccgggttggaaagccttttctgaagattgtaattaacgcgggcgtcgtgggattccgcctggcttatttcctgttccgtctgggccagtgcgtttttcatttgctggagctgggcctggagctgctggtgttcctgggatgaattgcccgtcaggaaggaggtcagggcttcattcgtactgctgtcgcacgaagtaagggccagcgtgagggccaatgccggacaggtacgcctggtgaatctcacgatgttgaacatgccggagattatgaaccttaacggaggggaaagtcaaactgttcatgcgccctccggaacaatgatttttctcgcataaaacgcgtatgcggctacaatgcccgcggcatgatgcaattatcggagattggaggccatctgacggccagaacgggtattgatgatttgatggaggatttattcaaggccctccattcgggagacgcaggcttgtgccagttgaacggcgggagccccgccgttattcctgaagtgacggaactttggcgacgcagcatggaggaactggtgcgaaatggcaaatttgacgtgctggtgggccattatgcccatccgggcggggatcctgccttcatccgtgccttggtgcgttttctcaatgaacgttgcggatggaacctgacgccggaaaatgtggcgattacccagggcggccagatggcctgctttacactgttcaacatgctggcgggcccgtgtccggacggtgctgtgcgtgaaatcctttttcccctgtgcccggattatgtgggataccagtcccaatccctgtgcggcggcgtcatgttccggggcatccggcccggcatacgcatgctggacgggcacacgttcaagtacgtgattgattttgaccgtctggacatacgtccggaaacggccgccgtctgcatgtcccggcctacgaatcccaccgggaacgtggtgacggatgaagaattggggcttctgcgggaaatgacttcccgcgccggggttcccctgatgattgacaatgcttacgggcctccgctgcccaatatttgttttgtgcccgtaaccccggcctgggatgagaacatgatcctgaccatgagcctgtccaagatcgggttgcccggaacgcgcaccggcattgtcattgcgcgcccggatatcattcgtgccgtcgtgagcatggtgaccacgtcctccctgtgtccgaacaatctgggccaggctctggtgacgccctatctggaagacggcactctggagagagtctgccgtgaaaccctcacgccgttttaccgcggccgggcggaattcgccctgtccctgctgccggaacttttcggagaatccatcccctggcgcgttcataagagtgagggcaccatgttcctgtggctgtggtttgagggattgcccatcacgtgccaggagctttacgaacggtgcaagtcacggggctgttttgtaaatcccggccatcactttttcttcgcccttccggaggagggggaaccctggccgcaccgtcatgaatgcatccgcatcagcttcacccagacggaggaactcctgcgcaaggggctttccatcgtggcggatgaagtgcgcaaggcctactcccgttcttaatccaaacctgacccgtatccatgaacagcatgaccggcttcggcagagccgccgcccagacagaccgttataatatccttgttgaaatatcaggcgtaaaccgcaaacaaacggaaatcgccgtcaatgtgccgcgcggctatgcggaatgggacgcctccgtgcgttccatcgtgcagggggctgtttcccgcggccgcgtaggcgtctccatttctgtggagcgtctggaggaagcggatggctccctcctgcttgatgagcagaaactggcctccctggcggagctgctgaaccgtgcgtctgacctgacaggtcaaccgttgcctctccaggcgtccgacctgctgaggctggatatcgttacttccgcagcggaagcatccctttctccggaagaagcgtggccgatggtggaaaaggcgctcaaagccgccttgaaggattttatttccatgcgtgcggcggaaggtgccaacctgaaagcggacgttcttggcaagctggatgtcttagagcaattccgcctccgtatcgcggaacatgccccttccgtgcctgtcaggcttcgggaggccatgctcaagcgcttggctgatgccgacctgtccgtttccgtggacgatgaacgcatcatccgggaagtggctctgtttgcggacaagtgcgacatttccgaggaaattacccgtctctcttcccattttgaccagttccgcaccttgtgcggttcctccgctcccgcgggcaggcctctggatttcctttgccaggaaatcttccgggaattcaacaccatcggctccaaggcgaacgattccacgctggcccatctggttgtggctgccaagacggagctggagaaaatcagggaacaggttcagaacatcgaatgacagccatgaaacagccattgggaacattgctggtggtatccgggccttccggttcggggaagacgacgttgtgccgccgcgcgacggaaaacggtctgtgtgtgtacagcatttcctgcacgacgcgccagcccagacccggggaagtcaatggagtagattaccatttcctgactcccgccgaatttgacgccagggtggagcggggagactttctggaatatgcggaggtgcacggcaaccgctacggtacgctgaaagcggatattttgactcttctggaacaggggaaaaacgtggtgatggatattgacgtgcagggggctgggcaagtccgttcctgccgggagggcattctacccctctgctatgcggacgtttacatttatgtgccgcaggcggagcttaaaaaccgcctttgcggacggcagacggatggcgctgaaacgattgccctgcgtcttcgcaatgcggaacaggaagacgcctgcctgccgcagtaccagtactgcctggtttcctccgaccgcgagacggattatgcttccttttgcgccctgctcaaatgccagtccatgcgggtgggactgatgcggtgataaggtcttgcctgtttatcgagagactgcgttctcacgtttcgtcccccgtcgtatggcatccgggatggaggctccggttccgagacatttggaattggttctcttcccgtgcctatatggtatgtgattccctttcctctgatccggcctgcgtgaaaaaacgcgggttgaaattcttgacgggcaggatactcataggctctttgaataattcaatgttgaaattatcctctaggcaaagaacctcggaagaggtgtcccggtaggtcagatactgccccgtttccttgtatccgttaattgcctttttgactaaaatgtttgactgtcagttgaacgtggatggatgaaactactgtttcccgttgttctcctcttaaggagaaggataatgtaaaagaagaactctgcttttagacgaaacagggatattgttttttgttcccgtgggaatgatggcgcctttgaccggacacttgggtttcctttccgttgaccgggccttccaaagctattatcgctctacttgagcggatacaaccagccgatggcgcaggtaaaaatgacccagaggagcaggttgagggggagtcccactttgacgaagtccttaaatttgtaaccgcccgcattgtacacgtaagtgttggtctggtagccgatgggggtggagaagctggcgctggcgccgaacatgacagccagaatgaagggaatggggttggcgtcgaattgcagggccatttcataagccagaggccccatgacggccgctacggcattgttggagatcatctccgtcaggatagagcagatcaggtacaggccggagatggcgaccaggcaccccaacgggcctatattatccactacgccgaaagcaatggctttggcaagcccggttttgctcatggcttctcccacgcacagcattcccagaatcagaaaaataatgccccagtccaccgcctggtaggcttccttcggcttgatgcagccggagatgatgacgatgagagctccgatgtaggcgagatagaagggattgaagcgcgcgaagaatttgaagaattccccgtattgctcaaaggatcccagcaggccgataaaaatgaacagccccatggccaagatggcccagccctgtttgctgcggttgtgcgcttccgcaggacgctggctcagggggatgatacgctgcttggtcaggatgcggttcattccttcctgcggtccttccagaagaagcgtgtcccctgccgccagcttggtgttcggccccatgtccgtgatgtttttgccctgcctgtggatggcgagtacgaagatgttgaatcgctggcgcagcttgagttcggacagggacagcccggcgaattcggaattgttggcgatcatgccttccacgatttgcacatcgcgctgttccagcgtttccagcccgcggctgtcatcccagcccaggtccacgcctttggcttcccgcacctggttgacttttctggcgttgcacaggaaaagaatgcggtctccttcttccaggttgatgtgctgcagctcttcttgcatggagaatcccctgcggcgcacttccacgattttggtgcccagcaactcggtttgcatcaggttgatgggagtggtgccgatgtggggggaatccgcgggaattctgacctggagcaggaaatcgcgctgaatgccgcccggaagcatggtggacaaagtggggcgggatggaagccatttgcggcctaatgtccagaggtagagcaggcccgccgccgcataaatcaggcccatgggcgttaccgtgaacatctggatgccgtcataacccagtttctgcacctggccgagcacaactacgttggtggatgttccgaccacggagcaggtgcctcccagaatggtggcgtaggagagggggatgagcagcttggaggccgcgatgttatggtccctgcagaaggccagaacgatgggcatcaggatgacgaccaccggggtgttgttgacgaagggggaaaccatgaacgctcccagcgtgatgaccagcagggcggtcagttccctccccttggctaccttgttgaacagtttggaaaggtctcctattaatcccgttctttccagggaagcgctcagaatgaacatacacaccactgtcagcggtccgctgttggcaaagctggacagcacatcacgcgtgctcagaattcccgtgagcatgaggacggcggtgcctgtcagggctgtgatttccacgggcatccattccttgatgaagctgatgaataacaggaccagcagaatgcctacaatccattgctgggcggccgctgattccagccagcctatgacggaggcggagttgatgttgagaagaggaagcatggtttgaaagttgaaggtgtggggaaagggtccaactctcctactttcccggcttctatctgtcaagccgcaataattttccggaaagggtttgaaaaggttcctgcgcttttttattgttggtgcgccgcatggattcccccataataacaaggtttgctcccagccctacaggcaatctccatctggggcacgccctggctgcgtgggaagcccgttccctggcgaaccgtttttccgggaagtgcgtgctgaggatggaagatatcgaccagacgcggtgccgtccggagtttgttcagggcatattgaaagatctggagtggctaggcatccgctttgacggtcccatgatggttcagtcttcacgcttcagcgcttatgaacacgctcttcagacgctgaaggaccggggcgtgctgtacccctgtttctgtacgcgccgggagattgcggaggaggtggccgccatgggtggggcgccgcaggggggctgcgtggacgtatatccgggaacttgccggctgcttgacaaggggcgcaggaaagagcttctcaaatccggcaaacctttttcctggcggctggattgccgtgctgcggcgcggattaccggtcccctgctatggagggacatgcggttcggagatcaggtctgccgtccggaagaactgggggatgtgattctgggccgcaaggactgcgccgccagctaccatattgccgtggttgtggacgacgccgcccagggagttacccatgtaagccgtggtgaggatttattccctgtgacgggcatccaccggacgctccaggccctgttggggcttcctgttccgcagtggtatcatcaccggctggtgaaggatgcttccggcaagcggcttgccaagagggacaggagcctgagccttcaggaaatgcgtgccgccgggatgcggccggaagacgtgttccggctgatgcgggagagctgagggattttcattcccttataggcgggggtgcgttgttccgccgggaaaggcagggggcaggctgtggcttgcgtttttccagcagccggtcggatggttttctttccgatgcagagcaggcatgcataagccgccgccagggtcagcaggagaagggagctcaggatggccagcagattcagatgccccagcgggatgagccatgcgtgcggcatggctgccgttcctgccagtatctggggaagccagatgaaaaccgcctgggaaaacaggctgacggctgtgaaggccagccccgcggccagggtgagccatactgacggaagtaccggcaggaatgtttcatggatgttttttttcatggcccgtgccgttcctgcgaatatggaaacgagaaacaggggggccagcaatgcggcggcagggagggtgtcccaaaggagccatgtgcaggggggggagacggccgtcaggaggcccgcgctcttaatcaggaggccccggggcggcggggctggtgccgcggcgtggttcatatccgttaatcgggccagacattgccgggcgtgcttccctgggtaatgacgacttcttggcctattttcagggtgaagttgggcgttacttcctgctgtacttccacaagttcgttcgtatccttgagcttgacgcgcacgcggatcattttgactgcttccaccctgccgtccacgatggagcctgtggcggaagccagttttgaggtccccatgccgatgatgccgggagtcatggcctccgccgccgttccggccatgttggcaaaggtgccgtcgtccgtggaggtaaggacgttgatttccttgatgcggaccacgttgcccagcttgatggtcgtcactttgccggtggcgatttccagattgcttttttgggtgcaggagaaaaggactgggagaataagaaaagcgggaatgaatggaagcggattcatgatgaacgtagttaactacgctggcggggttaagcgtttttcagcgtgtgggaagaattgtgtaggtagccagatacaggagcaaatggagggaggagagtgccagtaccctgttcatgcggctgtccgcgggcgttttgcggattaggagcatcagatacccgccgaagaggatggagggtatccacatccaccacgtgtgggacaggttcaggtgaagggcccggctggatgtaggcagcgtgatgtaggcagccaggatgaaagactgggccatggcgcgcgcctttccttcccccagccgcacggccagcgtgcgcttgcccgtagtgaggtcttcctttctgtcgcggatattgttgacggatatcatgacggcgcacaggaggccgcattgaatgcctgttacgatgccggcattgtacaccgcaagcgattccaccagcgtgccgggtacgacgggcgccgtgcctatctgcaccagaatggttcccagtacggcaaccagtccgaagaagaggatgacgaatatttcccccaggcccttgtaggccagcggccacggccctcccgtatagccataggtgaagtagagggacgggatgccgatggcgaggatgggccagccgcgcagttcgataaagggaaaggccagaaggcacgctcccagcaggaagaagaggccgatgagcatgactgttccgtgggagagggctccgctggccgtcatgcgcacgggcccggttcgccgttccgtatcggcgtgcttggcatggtcaatggcgtcattgaaaaaattgcaggcaatctggaggcacaggcaggaagtcagtgtcaggagggccagggacgcattccagctgccggtcagtttctgcaccaccatgcagcctgcccataccggaatcagggaggcggtgagcgtcttggggcgtgccgccagaaaggcggaagtaatgatattcatgtgagggaaggctccgtaatcagcggaggatggggccgaggcggcggagggtttccttaatgagtgagacgtgccattgcccgggggccgtttcctcttctcccaggtagccatataccaggcaggaacccagttgagagtaaagcaggcgggagacgggtcccatgggccccattcccatgacggcgatcggccccttgggcttggtgaaaagctgtactcctgtctggatgtccgaggccaggcagggcgtgaatgcaaatttgacgatatccgccttgtaggagcgcgcctttttttcctgttcgcgcaggtaatccacacccggagtgatttggaaatcatgggtggagccgatgatgatgacgtcccgctcccgcgcttccataaccagttccctggcgtggcgcatggccttgatttcaatgtccatggcggcggcatacggcatataggcccggagcagggcaaagcgctcttcttccgggatgcggcgcagccctccttcctcatggcagcgcacggtgaccagcaggggcatctccggccggaactccataacctgttcagtcgtgagttccgggggaagggcatccacgcgcagttccactagatcgcactggtctgttaaatcttttcctttcagcgttttccatagctcccacgaggtaacggacgcaacgattttcggcggataggcctgatgttcacgtacaatctgctgcatacatcctactatcccagcaaaggaaggaaggtcaatcttctattgatgagttccacttcattttggggccgagtatgtcagttcgcctgccttttccccttttggaactgtgtttttcttcctgtgccagccctgttggccggtttcccggtagacggattgacggatgttggcgccggctgccgttcaagatgccggcagggctgtttcgtatggtccgtttccttgttgtggcggagggcgttattttcctgcctctgcacgttaaaaacatgttgagaatggaggtccggcttgaaaagggagttcggagggagctaggtgaaggccatgaatatgctttggtcaaggttattgcggatggggaggaatcccttttgggcggctttggatgccgtgctggtggtaaggacggaaaaagattcgtccgggcatccggaatggtcctggaaggcgtatgtccctcatggcgttccggttcatgaattgcctccggtgcccgttcctcttccggaaggggattgggataaggagcggtttcgtaaggaaagacggaaagctgcccgggtgttgggtcaccaggccgctttaacgctggcttcttccctccatttctcccgtttcatgattgtggaggaagagtgccgtttcaggctgccggtaataggttccacggcgcggatgcttgggcagctgctgaaaggctgccgggaaagaactgctctgtttttaagtgagccgcgtttgtctccccatacggcctgctccgtggcgaaaggagaaaaatccatcctgctgcgcgtgacggatatggcggcatcagctgcgtatgtgatggacctttccttatgtgaacgcattcttttatctcttccgtcagatcagcgggtctggccatggctgaggtattatggttctctggaggaatggtttgcccggtatctgggacgttatggtgatttatatgctcttttccctgcgttcgtttcctgcggagagggcgctcccatgccctccctctgcaaatccctgggccatttcaataatgcacgcaccaaatatacggatctgtcttatctggtgaatccggcggtcaattcatggcgctggctgaaaaacgtgaacattttttccggcagaaaaaggcttgggtgagaaccccgggatgcgttttgctccggcttcgccggattaccgtttgcgggggatgaacgcctgcatggctggggttgccgccttacggcagagcttgaaataaggtgttccgtgcgcccgtcatctcaaaagcaaaaccccggaccgcaggcggtccggggcggctccctttttccggagggaggatgccgtgatattagaggggttagctggctccttcgtcgcacaggatcttgacaaagccttcctcctggaggcgggtggcgccgcaggcgaacttggcccggatttgcagggcttcctccatatcgtcgcgcacggaaagcttcactttgaaatcattccatatgccaaactgggccttgctctttacccaggccaggcaggaacggactccctcttctgttttgggaagcctctgggtgcggatgaatttgaatcccatgaaggtgtctattttcccttccaccagggcttttacattgttgaagtcataactgctgacctccgtttcccgcagcaggttcatgatctgggaactggttaccgcaatgacgagctggtctccgaactgcggggcatcctggttccaggcttcgttttcctcaaaaagctggagggctgcgcgcagcttggccacggtaaggttgctggcggatttggtgccgctgtccacgtgatccacggctatttgctggctttccttgaacggaacggcggtcatgccgtcttctcccacgtagttcgtatccaggaagccggagatcatcacgtcgtccatgcggcggcctgctgcggcctggagaccttcaatcgtcttgctgacgggaaggtccatgtctcccaggcgggtggcgtcaaattcatcgtagccaatggctttggtgaacgtgcgcggccgcatggaccggcgtgtggtgggagcctcgttcaaaacggtctgccccacccgcgtggttttttccgtgaagtccagaatgccgaattgatccagaaatacaaccttgccgctcaagtcgcgcatgacgctgacatacttgtccagccgggaggcgtgctgctggagcagggtgccccattttctggtgtattttacctgataattatcgctgatagttactgccatgattgcaaatataatgatagtttgaatgcaggaacggcaatttggattatcgggtccggaataaccggagcggtcctgccgcaagtgggatgcggccatgtcccctgcgggattgcgggccggtcccatccagcgctaacgtgtatggactacaaggcagaaaagcgcaccacggcagaatcgtgatgcgctgtataaggaatgaaaacttcgccttcccgctgttaaagaataatcgcgtgcgtccgcgtagcgtgatccgggccgaaaagggccagcatgcggcccgtttgccctttttccatgcggtaggagtaaaaacgcttggtatccgccgtgtccagcccggaatcatgaatctgttcttccggtacccccgcttcaatgagctgtgccttaatggccgtaggaatgtcttcttcataatgaggcgggcggatgcagggggaaatgacggcaatcaggttggacggttccaccccaaggcattttttcatggacttgatggtgttggaaacgatgttgccggcggttcccgccttgcctgaatgaatcagggaacggtggcagttttccttgtcgtacaaccacacggcggcgcagtccgccacgtaaatggcaagcacgcagtcggaaactccggagcaaatcaggccgtccacgccttccacaggataattggagccgatgtcccccaccagggcaactttcgtgccgtgcacctgttcggcgcggcgcaggtctttccaccgccagcccagggcttccacttccgccttatggtacggttccagccgttccagcacggtttcgcggtctccggtgacgtctactcccggaattctctcaatgaattggacgatttctccgggataggactggataggcttcaagaatgctggcgtttccataattgatggatcaataaatgtcgttggggacatcttgtcgttttgtattacctagtcgagcaaaatttggcgtaaaatgtcacggacgccgcccggtgactgagaaaaggtttttttccgcctttccggagtgatatgagcaattcatgctgcgcaggtattctttactttccactttttttgcgggaatggccgccgtgtttttttcctttgccgcctccttggcccaggaggcttctccggatgccgggcagttgctgaaaagggtgcgccagggggcaactcttcaggaaaacaaggacattaagggacaaatacgcaaacgcagcgtcaaaattcccttttccatgagtctgcgcggcaatctgatagccttccagtaccagctcaataatgtctggaacaggttcgatctgaaattcaaggaccgcggccaggagatcctttcctggaaggacgggaaagccggtgttttgccggttgcccagtatgcggtgcccattgcggggacggacgtaacgtacgaagatctttccatgcgctacctgtactggccccaggcaaaaattgtccgggatgatgcggcgagcaccgtcaaggggcgggattgctggattgtccagataccgaatcctaattccggggtggggcaatatgcctgggtgcgcgtctggattgataaggagaacggcgccatgtggcaggtggatggcattgaccgccgcggggagctggctaaaaggttcatgattgattccgtgatgaaattgaaggacggatcctggtttttcaaacggatgaaggtggaggtccgggatccttctaatccgcgcagaacggtctccgtcagctacatagatatggacagcccggaatagccttccggttcccgttccattccccgcggagctttcggattattctttccggggcatgggggcggattccttttcatgccgcacggatggatgatttaggacgtgacaagaaggcgggatgggcgtaaatcctccaaaaacctgttatgaagaaacatttattccttgcatgtgccctggcgttcggcatgtccgcctgttcccagcaccaggagcagccggcggagtccggttctccggtgaaaacgaccatttctcccgtgactgctcctgggaaaaagccggaccggccggccgtgaaattgcctcccaagtccgttccggtgccttccgtaagcccgtcctataataatactcctctttccccgcgcattccgggggtaacggtcaaccgtgtggctgtgccggacaaggtggtggccctcacctttgatgacggtccccatggaacgctgacccccagggtgctggacatcctgcgcgacaataacgtcaagggtactttcttcatgcagggctgcaatgtgaaggctcatccccaggtagtgcgccgcatggtcaatgaggggcatgaagtaggcaaccatacatggaatcacgtttatctgagcaaagtgccccgcgaaaaagcggaatcccagctccagagcactaatgaagccatccgcaacgcctgcggcgttgtccccgtggtcatgcgcccccccggcggctatacgaatgcaggcgtggcgtcctgggcccgccagcgcttcggcttcaccacggtcatgtgggatgtggacacgaatgactggcgcaagcccggctcctccgtggtggccgcccgcgccgtgaacggcgccaaacccggctccatcattctggtgcatgacattcacgcttccacggtggcggcggtggacgccattgtgaagggattgaaaaaccgcggctatgaactggtgaccgtttccgagcttatcaggagaggacgtgccgctgccggccatgctccttccatgcccgcggctcctgctgttccagattcttctccccttgccgttcctgagattgtggctcccgcggagcctgttcccgctccggcggagaaggtggccggcatgtaatccccggtgtttttccttttcctttcaacccggtttccctgtggaaaccgggttattcattgcctttccgcagcattgttcccaccgccccggaaaggaggctttccccttaacgggcacacgcacagaaggcttgacctgctggtgaatttctccacaatcctttgccgtattattcacacccaatccggattgaaatgtctatgaatctcctggcatctgccgatactctacccgcgcctggcggaatgtccgctcctctcgccttcatctacgatctcttcaataaccctcttttcatcttcattggcggtctggtattgctgggtgtgtttttctggtacctgggttccgaccaggacaaggtcaagcgcaatgccggaacgattttcattatcggcattgcgtctttttccctgttctccctcttccagcaggggttgaaatacggcattgatattgccgggggcgtctccttcacattgagcgtggaaccgaatatcggagacgacggcaagcccattcccctgacggaccaggccatggaacaggcatgcgtgatcctgacggaccgccttaacagtaccggggccaatgacgtcattatccgcccgaagaaaaaggacaacctgaatcttatagaagttcaaatccccgctgcggatcctgccaagcgtgaggaaaccaaggccatcctgaccaaagtagccaagctgcagattctccctgtccacccgcgcaacaacgaactggtggcggaggggcgcatccgcgttcccggctacaggatgtatgaatataccttcaaaaacggcaagggtgaggacgtcacggaaaaaatattcctggaaaagcgtgaatcgctcacaggcagggatatcgtgcgcgccggagtggatctggcccgtcccggccacgtcaacgtcaccctgagcaatgaaggggcggacaagatgtataacctgacttcccgcatgcagctgggccacgaccgcatggccattgttctggatgatgtggtcaagagcgctccaacggtccaggccattctttcgaaaagttttgaaatcagcgggctggatgctcccggagaggctgaagccctgacgaaggtgctttccaacccccttaccaacaagctcaattttgagtccgccagtgaaatttccgcctctttggggcatacggccctccttcagggggaatacgcgggcattacgggattgatcctctgcttcatcatgatgatcatctactaccgctttgccggtctggtggctatcatgggcctgacgatcaatgccctgcttcttctgggagccatgtctatcttcgggtttgagctgacgctgccgggtattgccggtattgtgctgactctgggcgtggcggtggactcgaacgtgctgatttatgaacgtctgcgggaagaaaaggaaatggggcgccccttccgcgtggctatccgcaactcctttgacaaggcgttctccgccatctttgactccaatatcacctcgctcattaccgctgtcatcctgtactggatggcaaccggcaccatcaaggggtttgccgtcacgttgacagtaggcgtcatcacttccatgattggggcgattctcgttacccgcgtcctgttctactgggcggataccgtcggcatgatgaaggatcttaaattccttaacctcttcaagaaaaagatgaacatcgacttcatgagccagaaaatctggtcctgctctctttccgccattctgctgatgatatgcattgtatttggcgccgtaaagggcaaggattgcctgggcatggactttacgggcggttcttccatttcctatctggtgaacaagggtgacatctccttcagggaagtggaaggcgtggtcaacaagctgtccctgacccagaaggctacggtgcaggaggtggcggagtccacggacagcagcaaagtgaatattctgattaatttctccgaccatgcccaggacaaggaggctatcaccacggcattggacaaggcgtttccggttctggacaacgctccgttcagtgaagaaaccatcgggcagtccatggggtacgatacgctcattacttccgcatgggctcttttcttcggcattctggggatcatggtttacctgacggtgcggtttgaatggaccttcgccattggtgcggtcatcgccctgacgcatgacgttctgctggtgcttggcctggtgattctcagcggaacggagctgaatgttattcacattggcgcgttgttgacggtggcggggtactccatcaatgacaaaattatcgtatttgaccgcatccgcgaattcctccgcttctccgacccgaatgaaagcgcttcacaaatcatgaacggggccattaaccagacgctttcccgtactattttgacttctctttccacgctggccgtgctggtgtgcctgtacttctttggaggcccttccatggaagacttcgcctggacgatttccgcaggcattttgattggtacgtactcctccatcttcatcgcttctccggcggctcttttcttctcccggaagcatgggttgcatgaagaagtcagacaggccatgaaggccggagcctgaggtctggcgttgagccgttaaatctctgaccggggaaggcggaatgccttccccggtctgtttcttggaaagagagggatggggaaaggctctgtatggaataacctccgtgttctttccccgtccgcctctttcgcttttcctgtttccaccatatgcggctacggcttccgcatggctcttctgtctcgcattcctccctcttttatttcaggcataagaaaaccccgcctgccgttaggcagacggggccgtatctctggtttcctgctatgtatttctgcgggtgagattattcatcatccccttcctcctgtgccggggcgggagggggaggcatgtcgttgttgccgcgggctgcctttctggcttccctgcgcgcttcaagagccttggaagcgtcagcgttgagctgggccatttcagcctcattcaattttccgtccttgtcggcgtcatacttttcttcaatcaggatccatccggcagccatgatcggggcgcggttggggtcaagctggggacggggaccgttagggcggttgccgtgggggccccggttaccgtcttcacggcgtccttcaccgcctctgcggccttccggtcctctgggagcgcgggggccttcagctctggggcctcccggacgcctcggaccgtccatgttgggcattctcggtcctttggggccaccgggaacggcatggtgcgggccgggctggccgtgatgagggggaatggactgcaattcttccggggagagcttcccgtcgccgtctttgtcaaattttttgatcatggcggcggcgtgggcttcctggcgggctttcatttcttccatgcgcttggcagcttccggatggttttttgcccaatcttcccgcatggctttcttttcctcgtcggaaagcttgccatcgccatccttatcgtacttcttaagaatttcggctttcctggcttcctggcgggctttcatttcttccatgcgtttggcagcttccggatggtccttaagccattcttcctgcatagcctttctttcctccttggaaagcttgccgtccccatccttgtcaaatttcttcaggatggcggctttcttggcttcctgggccttcttgacgtcggcttgcagaacggctatttcctcgtcggaaagctttccgtccttgtcggtatcgtatttggccaataccagttcttctccgacaatcatgataccgggatcgattctcttcatctgaactcgttttggcccctggcggtctctgcctccggcatggtggcgatgacctccccttctttcaggggggggctgcatttcaggagcatcggaaggagcctccggagcgggaggcggcggagcgtcctgagcgaacgcggaacatgcggcgaaagccgcggcgataatcatttgcttggtcatatctttgaatggtgaggtttgatgcgtttcggaaaggagcgtgcgctgcggtgtttcaaacaggcggaaacgtctccctttgctaaaaggaacccctggaattcattccggttgcaaaataaaaaggcaaatgcgtcggagagggggtgcgccgctgtttttatgacacctgttttcttccggggtaaagaagggtgaacccattgaatatgaaggaaatcagtgaggggatacgcaatcgggtgcgagtgcgtgccgcccgtgtcatagcggaaaaaattattcgccggaaataaagcggatgtaggcctgccaccactggctgccgcccagcagccagatcagagcggcgctgagaagagcggggccaaaggggaggtttctgccgaaccccatgcgtgaggcggcagcctgtacaatccccagcagggagccgaggaaaaggctgaacagggcgccctgccagccgcacgcgcatccggccatcatcagaatccaggcgtcgcctgatcccatggcttccctgctggcatggatatccgtcagatttccctccacgctttccagtctttccagaagaaaaacgtccccgttttccatctctatcctgtcgtaccgcagcgtgacggagcaggcagggtgcgttttgccgtcaatggtgacggaacctccggaaaggacggccttgtccgtagaccggtggaaaagcatggaccagtcgtgaggctggccgttgacgatgagctgaagttcctcccgctcggattccggttccctcaaactccacggggcgggaacgtcaaaatgctgtttccaggtgccgaacagaagcttccccaattcaatcaccagcctgatgaccgcataccctgccgctcctcccagcacggatgccgtgaaggcgtccgtccaggtcatgacatggctgtccggcaggaggaaagggtaaagggcgcaggcccccgttccggccaaggcgccgataaatgcctgagagcggaagacaatcagatgttccgcgtcaatgaacatgatgacaatggccatggcagtccacaggcagagcaggacggctgctcctgtggaagcgtccgcgtatttccagccaatggccgcgaagagcagggccgtgagcagctccacaaagcaatatcggaagctgatgcgcgttccgcagcaggcggatttaccccggagagccagccagctcagaaccggaatattcaggaaccagggaatgggttttccgcattccgggcagaaagaacgcgccggatcgttgacggagacgccccgcggcatacggtagataaccacgttcaggaaggaacctatgcaggcccccatcaggccgaaaaccacgggaatcacccatgcgggaaaggcgtcaggcatgggtgggcggggaataggttcggctgggcgtctggttgatgcggtcaatcagcagcctcagcctgccgtagttgccgcgtttgatggggaagacgagccggggcaggcggtccaggtgtggttcgtccgcttcatccggcagggggccgctctggatcattttccccccaggcagaatcaggtctgaaaagtcccgttccagatgttccacccactgggcgggaagctgcgcattcagccggatgacgatggaatctccgacaaaacggtaggagtggaaaatccggtaaaaacggtcgatgtgttccatggcttccgccggatttttagtgacatggatgagatgaagatcgtctgcggaaatcagtccggaatccaccagttccacgcgaatgaaggccagccagttcagccagaaggttttgccgggggaatccagaaggacaatcgggtaaatggtcgcttttcccgtctggatcagagtgagcgtttcaaacacttcatccatggttccgaagcctccggggaatgccaccatggcgtcgctttccgccacgaagttcagttttctgacgaaaaagtaataaaaattgatgagtttgtcgctgtgggccaccacatggttggaggtttgttcatacggcagggtgatgttcaggccgaaggagcgttgttctcccgccccttcattggctgcctgcatgatgcccggtccgcctccggtaatgaccatgtagccgtgttcgctggcttccctggcgaattccctcgccgtttcatacgccggttcgtcattcctgatgcgggcggagccgaagacggaaatcttgcggatgtggcggtacggggcgaaaacgcagttggcgcggtacatctcccgcccggagcggatcaggacggtaaaatcatggtccgaggcggcggactgggccatgttgattcccgttttgatatactcttggaggtagcggggatcgtgcctggtggaggctatttcggaaagctttttaacggcgccttccagagcctggtagctggaatccatggacatggtggagggacgtttcttgtcttcacctgtaaaatccctgttgtccaaaaaatcaggatgcttcatgagttggtatgataggtttgccctactatgccagatgacgtacattaagtcacagaaaatttaccggcgggcatgaaaagagttgattgttgaaaacagatcgttacattgctccccgcacgggcgttcccacaacatgccgttggtccttcaggcgcattggccgccatgtccgtgttgaggggaaacccggtacattacatacgattatgtcggaaaacgaaaccactactgcagaagaaaccgccgttaccacgctggcccgttttgaggttcccagccgtctggaaaaaattgaagatccgaatgatgcgaatcatttgacctttgtggcggaaccgtttgaaaacggttacggccatacgcttggcaactccctgcgccgcgttcttctgggttctcttgaaggcgccgccattacctccgtccgcatcgccggcgcgcagcatgaattttcctccctgcccggtgtggtggaagatgtgacggaaatcgtgctgaacctgaaaaaggtcaaattcaagcataacggcaaggaaccgcgcctgctctctctgcgcgtgcataagcagggcgttgtgactgctgccgatattgccgacgacaccgtttaccaggtggtcaatcccgatcaaatcatttgcactctggaccaggacaccatgttcgaatgcgaattccaggttcgcgtgggccgcggttttgccaccggcgatgaaaacaaggtgccggatatgcccatcggcgtgattccgatcgactccattttctctccggttacccgcgtgaagtattctgtgcagaatacccgtgtggggcagatgactgactacgacaagctgatccttgaagtctggacggacggccgcatcgcccccgcagacgccatgctccaggcttccgccattctgcgccatcatctggacgtattcgtcaactatgacgacaagcaggtcaactttgaggaagctccttccgccgtccaggacgaggaaacggcccgcctgcgcaagttgctcaacatgagcgtcaacgaaatcgagctttccgtgcgtgccgccaactgcctcaacaatgccaatatcacgaccgttggccagcttgccatgaagagcgaaagcgaaatgctcaagtaccgcaatttcggcaaaaaatccctcaacgaaatcaaggacaaattgctagaactgggtctctccctgggcgttcaggtggatccctccctgcttaccggtcccgtgccgcaggccaagccgcgcctgggtctggaagaggaaagccccgtgggcctggcagacctgattgccgccaacatcgaagacgacgacgactaaatctcacaaaaccaacacacatagaaaaatatcatcatgagacacggtgtaaaaacctccaagcttcagcgcaatgcttctcaccgcagggctctgctcgccaaccaggcatgcagcctcatcctcaatggacgcatcaccaccaccctggccaaggccaaggccctgcgcccctatgtggaaaagctgattacgcttgccaagcgcggtgacgtgcattcccgccgcctggctaccgctaccattcataatacgaccgccgttaagcggctgtttgatgaaatcgctcctctttgcgcggaacgcaagggcggctatacccgcatcgtcaagctgggccagcgtctgactgattccgcccttgtggccatgatcgaaattatcgatctgccccgtgaggctgccgaaaaggaagaagctcccgccaccacggaagccaccgcctaagacgcacctctggaacatcctgttaataccccgctccggccttttgtgaggccggagcggattttttattggcaataaggaagttatggcgataatatcgctcttgcttctttcctgccggaacgttataatccagctttaactatggacgcagtattattgttttccggacaaggtgcccaaaaagtaggcatgggcaaagatttgtatgaccagtatcccgtcgccaaagccctgattgaacaggcggacaaggcgcttggagaatccctttctgccgtcatgtttgaaggccccggcgaagaactgacgcgtacctgcaactgtcagcccgccctctacgtacatggccttgcctgcctggccgtcttgaaggagctcgttccctccctgaatcctgtggctgccgccggcctttccctgggggaattcacggctcatgccgctgccgggacctattcttttgaagaaggcctccgccttgtccagaagcgcggcgcgtttatggaggaagcatgcaacgccacgaaaggcactatggccgccatgatcggcggcacggatgaaaacgtcattaagctggcgcaggaatgtgacgtggatgttgccaatttcaattgccccggccagacagtcgtttccggtacggaggaaggtgtggccaaggctgtagcaggggcgaaggccgccggctgcaagattgccaagaagctcaatgtggcgggcgcctaccattcccgtctgatgcacagcgctatggtaaagctggcggaagaactcaagaatatttccttcggtacgccgtccatgcctgtttattgcaattatgaagcccgggtagtggaaggtccggacgacatccgcagcatgctggaacaccaggtatgcggatccgtgcgctggacggcttccatgcagaagctggtggaccagggccaccgccttttcattgaactggggccgggcaagacgctggccggcatgatggctcgcatctgcaaggaagctacggtcatctccattgaagacgtgcccagcctggaagccgccgttgcggagctgaacaaataatttccctgaataaaagggggtaagccgccggcccgttggggagccggcggttttttgttggcgtgttcatggcggggttccgtcaaataggcaatatcccatggaacaggggaaatgcctgcctccgtgccagcggccctgctcctgcgcgggcattttcctcatgccgccggtgggaagatgcatgaacatcagcatcgttcccatgaaaaaagcgatggcgggcacgaacagcggtttccatataaggaaaagtgcgggcatgatggaatgcgccgctcctcaggtcagaagaatcagggcaatgaggtaaaacaggaggccgcttttaggaggccggcaggagagcatgaaagccgaggctctgagccgcgccaggcgttcctggcggcgcagccccctgcatcaggcatgaaaggaattccgtcaggaaacaggcgttatggaatagaaattcctgatttctaaagaagttccgtcagagagcggatgatactggtcgccagggaaaaatccgcctgctccgttaccctgtttggaaccgagatgactggcattcctgcgcggtgtgcggctgtagtgccgttctgggagtcttccagcaccaggcattcggacggagatttacccaggttttccgcggctttcaggaacagggccggatccggtttgacggggaggccgtcgtcgcggcagacgacggtttgaaaatagggcatgatgcccaatctgttcagccagccgtccacccagcggtgggaagaactggaggccactcccataggggttccggcttcccccaggttccggatgagttctccggcgccgggcaggaggccggcatgttccagatcccggacgatttcctcctggcggcggctgttgacggtttcccagtcgaaagtgcgccccgtcaatttctccagatgttctccgggattccagtgggtgtagccgctgcccaggcattggttgaacaaatccaggggaagagggtggccgcaggacgcgaaaacccgttcccaggaggaataaatggcatattccgtatccaccagcaatccgtcaaaatcaaaaatgacggcgtgtgcttgccggagcagtgcgcgggctttcagaacggcttcccgggaatcggcaaaatgatcaggaggggtcatggacgggagtctttttcaagcctctcaataattccgagaagcttctgtgagccagcttggtttgaaaaaggcggatggcgatgatggtgtagataatgttgggcatccatgctcccagccaggtggggaggtagcctgcggaggccagggtggggaaaaactcatacaggaacagcatggctgccgccaggaacaacgcaatgccgatgccggacatggcggagcgcctctggaacgtgatggcggaggggatggcaataaatgtcaggataatgcaggaaaatatgcgggcgatcctgacgtgccattccgtctgcaggcttctgaggtacctggcatttgtcgtgccggacttgatgagttcttggagagccggggttccctgtgtatccacgcggacgttgggtgaaatcagttgccagggtgtttcgggataatgctctttcagcgtttggtattcctgcccggcaaaaacgggaacatcgtggagctggcggggttcctcctgggaataatttcttttgatggcctgccggaaggtccatgttctggaggccggatcccaggtggcttcatcggcaaacagctcgtatttcatctttccgggggcgctgaactgttccacccgcacctgccggaaaggattgccgggggaatcaattccgggaggattgcccagataccagatgcgggattccgcatcatttttgtagatggtgctctgggaagcatggttgtttttgttctggctcagggaggagaacatcagtttcctgtacagggcggagttgggcgcccagtggaacccgaagatgccgaagtagatggaggcaaagacggcgccgatgatgatgggggtgttgattcggagcagggaccgtccggactgcagcatgccggtgatttctgaggatgaggaaagtttggtaagcgcccagagtgttcccaggagaagggtataaggcagaatcaggttcaggatcatgggcagctggctcaggtaaaagcggaacgtgcccatgaggggtgcgtccaggttcatcaggtctcccacattgtccgcaaaatctccgataatgtaaatcagcgtcaggatggccgtacacatgatgaaggccgtgaaccaggtgcgcgccacatacttgtccaggatgctcgaacggttgtacaggaacattcccagagcggggagaaagcaacccagaaggatgagccagggccgcaggagctgggaaaggggatattcggacggcgtaccgggaatttcccattgcatctgggaccattcccggggcatcaggaaccaggctgccgctcctcctagcgcaagcaggaggagaaatgcggaccattggcggaaatgtcgggcctggattgccatgaaaaaagagggtggggcaagaatgccagatcgggagcgggaaataaagcgttatttggccgccggacagggataaagggctgccggaaccgcatgtccgtgcttgcttcgtgaacttcagtgcggttccgctccttaaagggaggaaatggctgcgggagatgttcctcctgatagaagttgactgttgtcaacgtaaactggatgagataaaatcttcctgacaactgtttcccggcagcagcctttccatgtttaaacgtcttgttcaattgtttcttctgttttttctggttgctgcgggtgttctggcgtggtttgcgtggtacgtctccactcctctgctcattcccgtgggaggggaggaaccctcctcttatcccgtcgcgggttccctggtgatggaacccgtggaagccgtttcatccgatggcacggctattgaaggttatctggtgcgcccggggcgtccggaggctctgtctccgcgccagagccgcgtgcgggatactctgaaattgcgtgggaaaatgccacatttggaagcaaaaccggagctggtcgtgatagccgcttcttggaatgagggagtggaaagttccctccctctggcggaagggctggctggagccggttacacgagcctgatatggaatccgcgcgggaagaacaatacccgtcaattctgcacgtacggattaagggaatatgcggatgtaacggcgcttttggacgccgtatcccggaagcagggtggattgcctcccgtggccgccgtgggtcagggatttggtgcggccgtgctgttgaaagccgcgtctgaagatccccgcatccgctgcatggtcagcatggactgctttccttccctgaaaaccgtggctgtccgggagatggagcaggattggggcaagcctctgtgctatgccgcttattggttgctggatgccggggtggattggcgtgcgggtttcagtacgtttgacgtggctcccgtggatgatgccctgaaattggattatccggtcatggtggtttgtacgaaccaatattttttctccacgctggaagattgcctgagcatttacgattccctgaaaaatgagaaaaaacagctttatgaatccatccgggaaggggaaccgtatggcacccgggaacggactttcctgcattccattgaaggaaagaagggggaaaaatttgaaaaggtctataaggtcaacgtctatgcgggggatgacgagctgcaggctggcattgcggaatggattcatgagaatacgcgcatgcccatgcccagggtgttgcctcatgagtcttacagtgcgcccgttacgggtaccgctccttccggttcatgaattgttcctttccttttgctgatgatcccgtgagtgcgaatcaggacaacaaccgagaactccgcgaaaaccgccgcaggcgcagccgttttattttgcccgcgcctcgccatctggcagctgtggcggcaggggctctccttgccgccgtgctggtgcattacctggggtttatcgttctgagctggtttgacctgggcattcatgtgcacaaagcccccgctgtccaggaggacagaaagcctctgcctgaaaaaatagttctgaaggcggacgaccgtcctgctccggatgtagcggaagccgttgaaaaaccggatattgagcaacttgaagagattcccccggaattgccggatttagaggatatgcttccggagcaggtagtgattgctccgggggaaaccagcttttccgcggatccggtaagtccttcccccccggaatccctttccccgaaaatgccgcaggtggacatgaatgccgtcgcaaaggggttgcccgaaccctctccgcctgagatgctgaaatcttccgccagtccagttacaatcaagacggctgaaccggacatggtgaatccggatgaatggtataacaataagctcaaaggggcgggcggtcaggatgattcccatttgccggatgggagcaaatctctttcccagctcatggcccagtcctccttgggcaaggacagcgggtacagcaggctgggagcggatcttctttttgaatacaacaaggcggtgatgaaaaattccgccaggctgagcatgcttcagcttgcggggctgatgatgaaaaatccagatacgattttcattgtggaaggtcatacggacagctttggttccgaggaatataatgccgtgctttccctgatgcgtgctaatgccgtccggcagtggctgaaggataacggcatagctctgacgcgtccgaatggggaatgcaggttgtacatacgcgcttgcggcgcttcccgtcccgtcgtttccatcaggggggaccgggatgcccaggccgccaaccggagggtggaaatccacatgcgcaagccgggagaagaaatacccgccgggagcctgccccttacgtatgcggtggatatgaacacccctgtcgcccgccaggtgcgggccggcgtgggtgcccgcgccggaatccccgcctccccggcagaaaggaaagcgccccccgcagtgcgtccatcttctgccgccccggaacgccgggaaaatcctgtgccgcgtcaggaagtaattcctgaggcggaacccattccggaaacgattccttcggcagagcctgtggaggaacgcatcccttcggcagagccggtagaggatgacatcccgctggctgaacccgtcgtgtgtgcggggagccgcgccgtagtgaagggaggtgccggattgagatggaattgatgcgtttccttccggtccgggcgctgccgaaacccgaacggctccggtatcttttctcctttgattttgacgatactctgttcactcttggcggccctgcggaagaaaggagcattttttttagaaccatgcgcatgctccggtcgcagtatggtgttctctggggcgttaatacggggcgtgaccctgtctacctgagggaaggtctggcggatatgttccgtgatgatgtggaagcgtttgccccggatttcacggtgacgatggaacggaatgttcatctggcggatgcggagggcagactgatgcccggtgtcgtgtggaacgatgactgtgctgttgcccatgacagcttgttcacccgttacggcggcatgctggaatcattgatgagccagctggaatgccggttttccgggctgggattacgcaggcaggacaatgacgctttttccctggtggtggatgatgcctgcggcctggatgaagtttcctgcgtcattcaggatacggttggtccgtatgaggaaattgtcacgcaaagggcaggtccctacctgcgtttcagccaccgtgattacaataagggaacatccctttcctttgttgcctcccggttcggcattccgtcttcccatgtcgccattttcggcgacgggcataatgatctggacgccatgcggcacttgccggaggcattccggtgctgcccttccaatgcggcgcaggaagtgaaagacatggttgcccgcggccatggatacattagcccggaaccgcgcacccggggcgttctggacggactggcgcatggagtgtttccctatttcgggatgaaggcggaggttttgaaggaggatatttgaaaacgggggagggccggatgctgacgggagatcggctttcaacatgtttctttcatcaaggcgctcccggaaggggaagaatcgtattgacaaggaatgcctgcaatgcagaaatgggaaagattctttcccaatcccgattacatgaacattccctctttttcccgtagcgtttccagaggttccgccgtgggctggtttttagtgttgctgctggtttgcggtgccggagccggatattatctttaccaggataacctggcaaaaagaaaagcggcccaggaattgaccgctgaacgtaaattgaaggagaaaaaggccagggaagctgcggagaaacagcgaataaaacgggaacgggaaatcagggagaagaaggaaaaggaacggttggcggcccagaaggcttatgaggaagcgcaggaagagaaggcgcggcaggcggcggaagcggcccgtaagcttcaggagcaggccgaacgcgaagaacgggaaaaaaggagaagggaggagctggaacggcgcgaacgtgaggaagaggcccgcaggcaggaggaagatattcctgtggaggaagagcctgaaccggaagggcgttttccccaacccgtgaaaaaccggatgccggagctttccgtttattctattccttgcagggatgaaatccagacggaaaaagataagccgctggaaacatggtcctgggacaaggcggaaaaaatggaggggatggaggaattccccacgggttcctctccgtggaaaaaagggaaagacgccggacgcatgcaggcgcttctggaaaaatgccgggaatggaaggatgccaaacttgcctcgctgaaggcgtgcccggcggcgaaggattttcccggcgttccggagaatggggcccagacggtcaggcggacggtggagatagattccaatattggaggctggcatagtacgggactgtatgcgccgcccggggcggaaatttcgtgttccctgtccggcgctcccaaagacggttcgatcagcgtccgcataggatgccatacggacagccttcataagctggatgaatggaaaagagtgccggaaataaccatgcaggttccggctggccgtgggcgcgtgaaaatggtgaatccgatgggcggccttgtttatgtgaatgtaggccagcgtcccagacgggggaaggtcttcaaggttcagatttccggagccgtgccgtcacctctgttcgtaatggggaagaccactccggaacaatgggccgaacaattggaaaataccaaggccccgtggggggaaatccgcatgccccggcttattgtcacgatgcccgtggaacagctgaaacagtgtccggatgttcagaagacggcggaatttctgcaaaaaaacatggctcttcaggactggattatgggatgggataccaagccggaccgcctgcatcatccgatgcgctttgtcgtggacaggcagatatccgccggggccgggcattccggttatcccgccatggccacaaaggactggacgaattccatcgccaccggttccatcatccattccggaagctggggtttgtggcatgaactggggcataaccaccaatcccctccctttacgatggaaggccagacggaggtatccgtcaacatattctccatggtgtgtgaagtgatgggaactggaaaagactttgaatcctgctggggcggcggtatggggccgtccggcatgagcgcggaaatgaaaaaatatttttcaggcacccagacttacaatgaggctcccaacaaggtgcagctcttcttctgggtggagctgatgtactatctgggatttgacgccttccgccaggtggctcttcaattccatgacaagccttatgacaacggcgaactgagtgatgaaaaaaaatgggaatgggtcatgaacgctttttccaaagtcacgggaaagaacatggggcctttctttaagatttggcgtacgccggtttccgaacgtgctgcgggcaggatgaaagaccttcccgcctggcttccttccaaggattatccggcctgttataccgcagaggaataagaaggttccggaacagggggggaggaggcgttgccgcactcgcttctggacggttccgccggctggggctaggatggcggagctgtgaaatggctgaatgactggctgggctttttcaagccccttcaggtgcggaacctgcaaatattctggtcagggcaggcttcggccctgattggaatgtggttgcaggtgacggccatgggtattcttgtgtacgatatttccggaggctccgccacggcagtgggggtgttggctgccttgaacgctcttcctttctttctgggcggcatgctgcttgccgggctgggggaccgttttgaccggaggaaactcctcatagccgtgcagtgcgtccagtggctggtggctgtagccctgtttctgctgactgtgctggatatgctccagctgtggcacctgtacgccgccgggctggtgatgggcgtcaatcagacggtgggttttcccacacagcaggcttttgtgggagacctgataccgcgccggcaattacaggaggccgtgggcatgtactctctggtatttaatacgtgccgggccatagggccggcgcttgccggctatatcattgcggaatggggcgccggaaccgcttttggcggcaatgtggcggcaagcctgcctctcgttggctgcttggttgccttaaagggatgcgtagcggatacctccgctcccagaaagcagcgcggcgcaggaaggaaagcatccggcctcaagacggtgcttgccacgcgcagtctgctttttattatgatcagcgctctcattcagaatatctgcgggcaatccctctatcagattgttccggcattgatgcacggaaatcccaggaataccggcctcattctgagtgcggtcggagccggggccatggtgagcatcctctttgttctgccgtttgcacgcaaaagcgacagggtgggggccaaactttcctcaggtaccctgtggatgggatgcgcactgtgtgtggccggtgtcgtcccggtggtggaagtgcaggccctctgtttcttttttgccggtttggccacttcttccctcttcgttacttcttcatccgctgtgcagcttctggctcccccggaacgcaagtcggccattctggggctgttcagcattgtcaccatcggtgtgcagccgctggcggccatgggttggggggctgtggtggatgcctggggtgttcagacaacgattgtcttggcgggagggttggaagccttgttttccatttggatgctgagcgttccatcttggcgtcatttcaaattttctccggatgactgtccggagacgacatagcgcctttcctccatttacggcaggtgaaaaccgccggtccgcattctgcggaaaagggagtgcatgggggctttccctcgtggaaattccggaatgcggccggatgagggaagaggaagcaggttgcagaaacgtcaggaaccggctgttaaccgtccgtttttgcttcgtgttcggaatagctgatgcccagcatgcagatatcgtcggcctgattggtgcagccggtaaatttggctacgcaggtaagggcctgatgaacgaaatccttggtgctgtgaggggaagaattgttgaaatagtcaatcagtctttccacgcccatttcttccccgtcctggttggcggcttccgtcaggccgtccgtgtacatcaggatgcgggcccccgccagaagcgaaaactgggcattatggtacgtagcgtcatccagcagtcccagggcgatgcctctgggcagcggcattttgcgggcgaccccgtccggccccagaatgatgggatgcggatgtccggctgtggaggctgtcatgaccccggtttccagatccaggtaaatataaacggcggaggcgaacatggtggtgttcgcccgttgcaggattttggcgagctggtggttgagggaagtaaggaaagccgccgggttatccgccaggtgggacaactgttccatcaggccgcggagcatggaggcgatcagggcggcgcggatgccgtggcccatcacgtcgcaaacgatggcgccaacgccggaattgcctacgggaaaagcatcgaaccagtctcctgcaaccccctccgaaggagtgaaaatatggtgaaaatccgcatggcgggtcaggccgtgttccgtatgggagcgggagggaatttcgtagggaagcagggcgaactggatttccctggccaaatctatttccttttccagagttctgttgcgttcctccaggatgcgggccgtttccgtggccttgatttctgtcttcaccagtttggtgacatcactggaaatacctacaattccctttagctctccgttgcgtccgtaccacgggaacttgctgatctggctccaggaatcatccttgtggagccatgtctcatgatgaaggcgggcgcggatggggcgtccggtaaccatgatgtccatttcctccttgcgggaaatatcggacatcgtttggtcaaaaaagtaatcgtccgtgcgtccggtcaggtctgccggcgtcggtacgcccagcttattggctgtggcggtattcgccaggacgaaacgtgattcccggttcttgaaatagatactgtcgggaatgtgttcaatcagggtatgaaacaggtccctgtcctccgcagcgcgcagttccgccgtttttcgccgggtaatattgacccatacgcccaccagcataacgggccggcgctgtttgtccctgcgggcaaggccgttgacgcggacccagctccagcttttggagttcagcttcttcatccggatttcaatgcgcatgggcacatgggagtggccgtccagataacggcgcacttcctgggaaaaaaaagcctggtcttcctcgtgtatggtaagctccggctgggtgaagatattgggagctttctccttgcggctggcccccatcatggtcaggcagcggtccgtgtaatgaatgacgcccgttttaatattccagatgtaaaatccttcttccgccgccgccagggccattttgattttgtcccaggtaaaaactctctgggcggaatgtctgttgcgtgagggcggcattgcagttgccgttaatctaacgacaaaaccgctgtcttggcaagaggcaaaataaaggaatcctttctgaaaggaggtctggccggagggatgcgtatcaaggacgccggctggtttttaaaatgagctcctatttttctttttccttttcctgggattgaagaaattgcagttctttcttcaaagcgcttcctacgcggtgctttgccagataaacctgggcaatcgtgactccgagctgccggcggaccttggccgcgtcccactcccgcaggacataatagtcaaaaatttggaactgcttgggcgacacttttgccttgacgcgttccagagccgcctgaagaaggttattctgccattcccgttcccatacctggtcaaaattattcttcccttcatccgggattttgtcgatggggtgttccaacgtgcctggggcatccggattcatcagcatggccgtgtcctttttcctcttgcggaactggtcgttgatgcgccagcgggtcatgttccagagccagagtttgaaggaaccctgttccggtttgtaaatatttttcctgctctgcttggcgatggaaagaatggtttcctgtaccacgtcccaggcctcgtcttcccttaatccggccttgagggcgacggaatagataagccgccaatacgtccggtaaaattcatcccaggtgcgctggtcttcccagttttccaaacgcgcgatcaggcttttcctggtatgttccgcgtattgggaaagtgtctgctcgtcaggctgggactcgttatggggttgcaatggggacacattcatggtttatcatgaactacggatggaagtgaagcgaaagccgagtaataggacggaaaattctgcacggtccgtcctgttcattcactacgtccgtcgtggagaaaatctttcagggaaacggacatgatcaggaaaacgtcaaaacgcaggggaacctccgtcatcgcggccctggttgcgttgtgcgcggtggtggggtacggtttgacggagtgggcgccgctggataatgaaccgcaggcggttcctgcccgccagagggaagagcggcagacggttcgggagaaggtggaaatccccgacaagggggagcccgttcgtttgctgaccatgaacgccggcaactactttgtgccggaagaccccaggagaagcaattttcaggtaaaatacaaacctgtggaagcccgtgaagccgtggcggagctggttcgtcaatcgggggcggaaatcgtggggctgtgtgaaatgggcggggaggctgccgttcgtgacttgcaaatgcggctgaagagaaagggagttcatttgccgtacaaagttcttgtcatgcgggatggggaagaccgtggtttggcccttctttccaaataccgcatcgcggataaccgttccgtagcggacatgcctgtatccggagaggcgaaacggaaaaagacgatgctgcggggcattctggacgccacggtcagcatgccggacggacggctgttccgcctggtgggcattcatttgaaatcgcgcctcagccgtgacggttccgcagaggatacgcggcgaagggaagcctacgccctgcgggactacctgaatgaagctcttgcctctcaggacggcatgcctctgcttctgtacggagattttaatgacggcccgtcagacagcgccgtgcaggtcatccaggggccggccaaaacggaataccgcctgaaccgtttgaagcccagggattctcgtggtgagacctggaccatttactacgaagacggtgacacctaccattccttcgatcatcttttcctgaacaatactctgaaaaagcgcctcggccgcaagcctcccatgggcatccttgactctcccccctcgctccaggccagcgaccaccgcggcgtgtgggtggaattaagataagcagggcctgatgttttttcagcaggggagatggaaagggaaaaaatgaaggctttggaaaaggaggacaaaaaattcttttcttgtcgttccggccttatccttcttgaaatgcgggagttggaccgaccggatgtttttcttttccggaaggatggcggaagcagggatttccgcatggcgattccttgccggaattttgttggacaggaacatatcaggcattccagttcctcaaaaaatgattgccgtgtccgtctgaaacgggtagcatgccaaaaatcgttgttcaatcctgcatcatctgtatgagatatttttccaagcattccggaatggctccgcgctgttcctcgccggggagcaaggggtttaccctggtggaattgattgttgtcattaccattatggttgccatgatggccttggccgccagcatgttaagaggcggaggcagagggcagggccttcaggccgccgttgaaatggtggacggcatggtgcaggaggcgcggctggatgccatgggcaaaggaacgtggagccgcctgattattgtgagcactcctgatgacgaagcccgcaatatgcgcactttgggcgtgatgtccaaaaatacccgcaccgggaaatggcatctggtgaaccgtttgcagactcttcccgccggtttttacgtcagtccgacctacagcacccttctggaaggcgcgaagaaagccaggggcgagaaatccacggcccgcgattttgccagtcgtgacgggcaggataccgtcaaccttcccggcaacagaatgacggatatttacttcattgaatttgacgaggaaggccgcatgtcccagccgaacgcccccacccgcctggtggtggttgccggttccgccgggaacggcaaggaggagaggccaaccccgatggtggacggcaaaccgggcctggcaggcggcattgtgatttatcccaaaggcaatatcagccgtctgaggacgacggagcaggtgattcccaattagtttctgtgatataataccagatttcccattttatgttgaccaagtgtatgaaacagtctcgttccaaggggttcaccctgacggaagtggtgcttgcgatcggcgtggtggccgtgctgattgtagtgttcatggccatgtttattcctgccagaaggacggttcagtccgccctgactattcgtgaagcggaccgcatcgtccacgccctgacggcggaactgggagaactccgcaattccgagcgtgccgcgtccaacgccagaaagtcttcctcctccaaatatgtttctgcttttgacaaggcgttttactggatgcagttcacgtccaggcccgctacgaccattcttgtttacaattacagggcggatttgaccaagggggcccgcaaagacggaactccccagccctggctggaggatggcggaagcattcccggcaaaaatactgcggtggtgacaggggtctgcctggcgaacaacaaagagcgttgggatgatttcaaggcccttgtcggtcccgtcttcgccgtgcgcatgacccagctggtagtggaacgtatggattcaagctcctacgggtataagctggctcccaagtacggaacgatttataatccttacaaccgcggcaaggtgattaaggaaccttccctgtatgtttatacgccggagaaaggcggcggcctgaatttgccgtggggggcggaagtcctgtaccaggcggagttcttccagctgttgaatacggaccctgagcgtttacaacatctgacgtgggaaaatttaaagactcccgtgtttacgcgcaatctcgctttccgccgttagcgggcattatctgaagacctctgaaaaaacatgaagacatttgccaaaatcaaatccggcgcgttcaccctgattgagctcctggcagccatgaccatcactaccgtgctggttctggtcattgtggccctgacttcccgcggggtagatatctggagatgggtgctgcaggatgtgcggaccacgacgcttgcccgcacggccatggataccatgaccaaggattttgaaagcatgcagttccgtcccgggaatccctttgagtggatgctggtgcagcgggacagcgatttggtttcccgtgcggaaaagaccaaggtttccaggaaaaagggccgctcttcctccctgaatgaggcccgcgtgaacctgatgaccatggggccggaaggcgccaaaatcacaaatgcctcccaattggttttctttaccacggctacggaccgcaatccggccaagtccagcatggacatgcggaatgaccgcatcattggtgatgtgaattgcgtgggatacaagcttctttaccgtgaccagattctggaccaggacgctacggcggagtctgacggttttcccgtttattccctgtaccgcaacttaatcagcgcggaggataccgtgcggaaccttctgggccagcaggatctatggtccgcttatgcacggtaccagcaggatgaaaccgtcccttccaacttcctggtggagaatattgtggaaatgacgctgatttttgaagtggattaccagaagaagatcggcaattccggcagcaacaaatcggacaaggatgcctcgcaaagagcatccgtgctggttccggtcatgactacgggcgccaaccgtctcggctcctgcacccagatggatgtgtatggcaatcgcctggacatcataggcagcagcgtgaatattgatgatttgaaatccggccgcgttactgccgtgacaatttccatgacggtggtgacggatgaaggcatggctcttgtggaccagatccggcagaaaaagcgtcccgctccctctcctgaggaatttttcgaacgttatacccggtctttcacccagaggattgcattgccgatgaaccgttaggcttgtatccgggaaaccggggagggcggaatcggccgctgttgctttttgtctggagcgttcctgccgttaattgttctgtagttgccatatgttgggtttcacaaatatcgtcggcaatttatcccctctgccggaattagtgctgtggcgcgatcctgtcgccagaagcggggaggaagccatggccgtggacgaagctctgctggaatggggcaggaagcctgtgctgagggcgtaccgctgggcggaaccgaccgtgacttacggttattttgatgaggaggccacggcgcgcgccatttttccgggtgaggagcttcattttgtccgccgctggacagggggggggattgtagaccatcggcaggatattccatttactctggccatgcaccgcaagggagaaaaagagcgtccttccagcgcggttttgtaccgttggattcatggggcgctggcccgcgtcctgagggattgcggggtggagtgcgtgatgctggacggggatgccccggacggagggcgggcctgtttttccagccccgtaacgagtgatcttgtctttcccggcggggaaaaactggctggcggcggccagagaagagtccgcggaggcgttcttcaccaggggagcatccagaattgtcttctcccttccggatgggatgaattgctggctgcccgcctggcggaaaagcattccctgtgcgtggacgcggaattgttccccggcatgaatgcctgcgtggaggaactgctggcttccaaataccgtacggaagcatggcgttccggcgtacggcatgggcgtccgtctcaatcacggtaatttccctttttcccgatgaactatcttccagatcccggccgctacagctacgcagcctaccgccgttgcgggcgcagcgggctgctgcttcctcccgtttccctgggtctctggcacaatttcggcgtagcggatgattttgagaacgcccgccggcttattcacggcgcgtttgatgccggtatcacgtattttgacctggcgaataattacggccctcctcccggttcggcggaagaatgctttggccgtattttcatgcaggatttgtcccgtttccgtgatgaacttgttattgcaactaaggcggggcatttgatgtggcccggcccgtacggggactggggatcccgcaaacacatgcttgccagcctggaccagtctctttcccgcatgaagctggggtatgtggatattttttacgcgcaccggcatgatccggaaactccccttgaagaaacggcgggagctctcattacggcggttcgctccggaaaggccctgtatgccggtatttccaaattcccggcggaacaggccaggcagatgtgctccatgctcggggaggccggcgttccgtgcctggtgcatcaggttcgttacaatatgtttagtcgggaaccggaaacatccgtttttcaggctgtccgggaaacgggtatcgggtgcgtcgctttttctcccctggcccaggggatgctgacggaccgttatctggagggtattcctgaagattcccgcgcggcgggttcctccgtctttttaacaaaggagcgggttcttcagcatggggataagattcgccgtctgggcgccctggcccggagccggggccagagccttgcccagatggccctggcctgggtgctgaaagatcccgtagtgaccacggctctgattggagccagccgcccctcgcaaatcagggattgcctgaaagctctggatagtgcgccgtttacgccggaggagctctctcttattgacgcaaatgcggatagataggcgctgcttttcccgtggcgctggtctttctgcaggaaggtgaattttctcgttccggacacaggttttttcttggagtaaagtagagctggtgttatgtttttaccactttaatttaaagtgtactgacaatgataaccatccaggatttattttggctcatcccatcggcttccgtgctggccctcatttttgcgggcatctttttttaccgcatgaaagcgcaggatgaggggaacgaggtcatgaaaatgatcgcccggcatgtccgcagtggcgccatggcctatctgcggcagcagtataagattgtcgccattttctttgtgctcattactgttgttttcgcttttctggcctactgcctccacattcagaacccctgggttcccttcgctttcatttcaggcggctttttctccggtctggccggctatatcggcatgaagacggctacgtacgcttccggccgcgtggcgaatgcctgccgccattccctggatgccgggctgcaaatagctttccgctcgggcgccgtgctcggcctgaccgtcgtgggccttgccatgcttgatatcggcgcctggtactgggtgctgaattggttttacggggacatggagctttccatgcgcctggtcgtcatcactaccaccatgttgacgttcggcatgggggcttccctacaggcgctgtttgcccgtgtgggcggcggcattttcaccaaggcggcggatgtgggagccgacctggtggggaaggtggaggccggcattccggaggacgatccccgcaaccccgccaccattgcggataacgtgggcgataatgttggggacgtggccggcatgggtgcggacctttacgaatcttactgcggttccattctggcttccgccgctttgggcgcggctgcttacatggccgttcctgaaatggcgatcaaggccgtccttacgcccatgctgatcgccgccctcggcactattctttctctgttgggcgtgtacgcggtgcgcgtgaagcgcggcgcttcccaaacggagctgatggcagccctgaaccgcggcatcaacttgagttccttcctgatagccattgcttccgctttcctgctccagctcatcggcctggataactgggccggcatctggggggctatcgtcaccggcctggcggtgggcatcgtcatcggcaagagcacggagcattacacctcccatgattcctatccctgccgtaaaatcgcccacagcgcgaagacggggccggccaccgtcattatttccggtatcggcatcggcatgatttccacctgcattcctgtaattactgtcgtcgtgggcactgtgctggcttatggcatggcttccggggactggcatttcaccggggctgaaatgagcaaggggctgtatggcatcggcattgccgccgtcggcatgctttccacgctgggcctgacattggcgacggacgcttacggccccatttccgacaacgccgggggtaatgcggagatgagcaaactggatccggaagtgcgccgccgcacggatgccctggatgccctgggcaacacgacagccgccacgggcaagggcttcgccatcggttccgccgctctgacggcattggctcttctggcctcctatattgaagaattgaagattgccatccttcactggagtgaggccacgggcaataccatttacaaaattaatgacgccgtaagcgtggaggtttccaaaatcgccactgcttccctgtctgatttcatgggctatttccaggtaaccctgatgaacccgaaggttctcatgggtctcttcgtgggggccatgatgtccttcatgttctgcgggctgaccatgaatgccgtcggccgcgccgcggaaaaaatggttaaggaagtgcgccgtcagtttaaggaaatcaagggaatcctgactggggaggcagagccggattacgtgcgctgcgtggaaatttccacggcgggagcgcagcatgagatgatctggccgtccgtgctggcggtcatcacccccatctgcatgggcatcgtcttcggcgtccccggcgtgttcggcctgctggccggcggcctggcttccggctttgtgttggccgtattcatggctaattccggaggcgcgtgggacaatgccaaaaaatatattgagcagggccatgtgggcggcaaaggctcggaaagccataaggcagccgtcatcggcgatacggtgggcgaccccttcaaggatacgtccggcccgtccctgaacatcctgatcaagctcatgagcatggtggctatcgtcaccgccggcgtgaatatagccgtgaccctgttctaaacagaaagattctttcacggaaaacggagggagtcccgctgttctagcgggactccctttttttctggctgaagggaatcgtccactggtgagcggttttttaatttccgcttctttcaaaggctctctgaaagactgttcctaataggagggagggggtaagtatgatttttttaatcatatttttatttgtatcagattttattttggttagtataaaaaataacaaaatgactgacagaatagaccagctggctttttcttccttccggtttttattctgctgtctggcagttttttccggcgttgttcccttgtgggcttcggatggcccggatgatgacatgaaggagacggaagaggaagcctgcgggcccctccagattaaatcccagacagagttgtgttctgcggattattatatcaagggaggaagtgaacaggacaaggaagacgatagaaaaagaaaaaatataggaattggggagaatatctcctttcttctgatcggcaaacctaagggaaatattgaagaaattacctggaatattaaaggagaaggcttccagcagacagatactaatccattcaaaggttcgcaacagatcactttgactgccaaaaaggatttaaccaaagatgcccgcgtcaccattacagccaaaaccggcgaagacaaagaagctaaaatcaccgtcaatatcaggattcccaagaagataacggaggaaaaatatgagggacacatggatctgggagatggcttttccgccaatacggctgattttaaaatacccaagggagaacacggtgtctggggatttgttaaagtgacgctttttcctactgacgtcagttttaagggagtcaaggtgattgagcgggatgggggactcatgtgggaaggaaagaacgggactcccccgcggcctcaaccggaactggcagccgaacatgtaacctgcaacatggccgctcccattcaggataaaaataatttttatgatatggtaggggacaatcgcgatattgaggaagttcttgaaacgattcgccggtccaaacataatcctcaacaattttggtttgtatgcaacttccatattcattggggaaagggaggaaaaggcagtgaacaacaggattccatttttttaggaacgacaaatcaaaaataccgtattgaagccattgatcaaaataccacaaaaacggttgttgagaaattcggcatcacctttacaagaaccagcaatgaggattaaaaaacaatgaacctgttatctcctttatgcgcgtgtgccgtctgcctgatgattgggaagggcaatcaggcctattccgattctcccctggagagcccggcgtgcatcgaccagtacaaacagccgtccgcaaccatccggggactctccggtttgctgaaggacatgcggcttaaatccttctacaacggggccaggaaacatacgctcacctttagtttgacgacacaggataacattgataccgagctgaaagagaaaatatggaattattatctggtagcttcagcgcccctttttacctacaaaacgtaccgggaaatcgagccggatgttgatatgggcgatgatagggctgatattcaccgcaagtccgaagcctgcctcctcatggaaaaatatatcggcctggttcgaaagacgaacaaaatcaaggaacccgtcaaaaagcagatcatccggcgcctgtttctttcctattacgcgcgtatcctgaaacagtacaaaaacgcgcaggaacccaatccctaccagagggatgcccagggaaatcccgtccctcccctttccgacaaggaaaaggaattccggaagcgtgagatagaaagaatcaaacgtctccccgttcaggaagtcctcaaactgatgcgtgaaggttcaagccaccgctcttttatcgagacaagaaatgaagtgtttggagatgaagtcaagcatcttgaaaaatccttcatgaaactgcttgtttccgaattccccggtcaatacggcaaggtagagaattttattctggaagccggatattcgaaagaagacatccccagcctgattgaccgcaccgtgggcagggacgaaaagacggatttcctttataaagggaaacatcgtcagaaacatgacaggctctacaggaaaaagaagtgacggtgtctaaagccgaatgttcaagacgctctttcttccttttctttttgtgaagagatagccggaaaccgggggaagtgaagaagtcttgcaataaccggtttctggaaagggaattctggattcgtaaagaaggaaaagaaaaacgtgctgcgctatgttcgcagctctgttccgccggtgggagtgggggcgggcggttccttggaaagtttgaatgcgccggagaggtgtcgtgttttctctgggccgattgagaagccaatacggttttttcgccattgacggaaagtttttttgacaaagaaggggcagaggagtaataaacgcgcagatgcgtttcagcactgtacagcccttttttagcaagaaccgttattatggtaacggctattggtggcgcgtacccatgtccggacgggggaatcccgaggtgcagtaatagcattcagctatgaccatttttcaagaactgctttgattcctccgagagtcaaagcagtttttttattttcaacttacatccaccatccatgcaaacaccatccatgattactctccaacagcgcagccgccgtctgagcgccgatctggagacccctatcagcctgtttctgagcctgactcagaataaaatccccggacttctgctggaaagcgcggaagtggacggcagatgggggcgctacagcatcatcgcctgcgattacctgatgaccgtttcctgcgtaaacgccaggctttcccttttcatcgaagacgaccgcctggcatccctgaaagagctggaaggcatgccttacctggatgggctgcgcgtcctgatgcagcgtctggagctggtgggggacgatatgaggcaggctcccatcacgagggctttgtacggctatttcgggtatgaaaccgccgccttgttccagcccaggctggcgcaggccattcctgcctcttccgcagagtcctgcctggtgctggccggcaccgtgattgtttttgaccatttgtacaatcgtcttacccagctcagcctgggcgaacaccgtgatttgtcccatgccccgctccatggggcggaggaaccttctataggggaggtttcccgcacgccggaccaggcggcttacatgaagggggtggagcatatcaaggagctgctgcatgacggagaagccatccaggtggtgctttcctcccaggcttccgcggagttccacggagacgctttcatgctgtaccgccgcatgcgcagcattaatccgtccccatacatgtttttcatgcgcctgccggaggtgactttgttcggatcttcaccggaactgatggtgcgctgcacggacggaaaacttcagctttcccccattgccggaacgcgcaggcgcggcagggatgatgaggaagacgccgccctggccgccgatcttctgaaagatccgaaggaatgttcggaacatgtcatgctggtggatctgggccgcaacgacctgggccgtgtcgccaagcccggttccgtgaagctggaacgcctgatggagattgaacgtttttcccatgtgatgcatatgacttcccgcgtgaccgcccaggtgaacgacgggttgggcgtcttggacattctcggcgctgctttccctgccgggacggttagcggggcccccaaggtgcgcgccatggaaatcctggcggaggaagagcctttgccccgcggtccgtatgccggatgcatcgggtggctgggattggacaaaaacggcgttcacatggattccggcattaccatccgcagcatgtgggtgaaggatgggcgcatccactggcagacgggagccggcatcgtatacgattccgatccggcagccgaatggcaggagtgcatgaacaagggcaaaattattgacgttattttgaaaggagaagaccatgtttctgttcattgataattacgattctttttcgtggaatctggtgcaggcgttttacgccctgggacgcaagcccgtggtgcatgcgaatgacgatccgcgtatcttggaactggcggccagcccggagctggaagccgtgtgcatttctccaggccccagccatccgcgcaacgccgggctgtgcctggagttcctgaaacgcctccccgcttccgttcccgtgctgggcgtgtgcctggggcaccagctcctgggctacttcgccggggcggaggtctcccgcgccccgtatgtcatgcacggcaagagctccgacatcatccatgacggcgcggggttgtttgccggacttcccaatcccatgaccgtgggccgctaccattccctggtggttcagtccaaggaggacgagccgaacccccgttttaccgttacttcccgcggtccggaaggggaagtcatggctctgcgctacaatgaccggccgtgggtgggcattcagtttcatccggaatccatcctgacgccggacgggcttcagcttctgggcaacttcccggataacgtcgtgccctcggggcagaaggaaaagcgcatcagccgcattctggacgccctggccgccggacaggatctgacggcggatatggccgccgcaggctttgcggacatcatggatggccgcatgactccggcccaggcgggctgctttctaatggggctccgcatgaaaggggaaaccccgctggaaatggcccacgccgtgggcattgccctgggccgcgccaaccgggtggaaggattggagggtgactgcattgacgtggtaggcacgggcggggacggccgcaactctttcaattgctccacggccacggctctgacgctggccggaatgggatacagagtggtgaagcacggcaaccgcgccgtgtcctcctcctgcggttctgcggatgctctggaaggcctggggttcccgctggacgtagctccggaggatgtccggcgcctgttggacgagcggaacttcgctttcctgttcgcgcctaattttcatcctgccttccgtaatgtaggccccatccgccgggagctgggcatccgcaccctgttcaatctgctgggccccctcatcaacccggcgcgccccacgcacatcctgctgggtgtggcccgtccggaactcgttgagctgctggcggagacgctccgccagtcccacatccgcaaggctgccgtagtatatggtgccgggggatatgacgaggtgacgccgctggggcccaccaagatgatgatcgtccacaacggcaacttgacgcccatgtccctggatccctcggattacggcatccagccctgcaatccggaggaactggccgttcattccaagtcggaagccgtggatgtgctgaagaacatcctggcggggaaaggcccgcgtgccatgatggatatggtgattctgaatgtgggggtagccatgttcctgctggaggagcacatggacctgtccgtctgcatggcgaaagcgcgggaagccgtctgcgccggcataggaaggagaacgcttcatgctgcttgaccggttccgggaagccaaggcggaggaaatagccctgcttatggacatggcctcccgccgggaactgccgcgcccgtggaaggggcgccggccggatttcctgaaagccattgcggaaccgccggacggccagccggtggcggtcattgcggagttcaagcaatcctctccgtcgcgcggcgtcatcgcctccgggttgaaaccggaggaagtggctgaacagtacgctgcgtcgggagcctcctgcatctccgtgttgacggaagaacagtttttcggcggccgcatcggctatttggaacgcatgggccgcgccgggcttccgctcatccgcaaggatttcatttttcatcagcttcaggtgatggagacggcttctacgccggcttccgcgttgctgctcattgtgcgtctgacgccggacgcacggacgctccgcgttctcagggagcaggcggaggcttacggcatgcacgccgttgtggaagtgtttgacccggcggacctggacattgcccgggaatccggcgcgcgcatcatccaggtaaatgcccgcgacctggataccttgaagacggacaggcaggcctgcctggacatggcgaaattccgccgtgagggggaggtgtggatagcggccagcgccatgagcgccggggcgcatctcagggaagccgcggaagcggggtttcaggccgtactgatgggaacagccctgatggacggaggaaagccgggtgaaaaactggcagcaattttagaagaaacaatatgaagaagcattcatttgcaatcaaggtgtgcggaattacccgccagagcgatttatcaaccgccatggggatgggagcccatttctgcggcttcatctttcatcccggaagtccgcgttacattgcgccgccgcgcgccgcggctctggattccgccctgatccgccgcgtgggagttttcgtgaatcagaatgcggaggaaatcatggatatcatgaaaacggcccggctggaattcgcccagctccatggcgcccattctctggactgcgcgcgccgcatcggcccggaaaaggtaatccgcgtattgtggccggaccggtatgaatccgtggatgccctgcaaagggaaatggaactatgggcggacagctgcgcctggtttctgctggatgccggcacccagggcggcggccacggcgtttcccttgactggacctccctggcatctctgagttccccccggccctggtttctggcgggcggcctttcttccgcctccctgaacagggcgctggaacaatgctctccggacggcattgacctgaactccggcgtggaagccatccccggccagaaaagcccgcagaagctgttggcggctctcaaacctctcaccccttacactccttaccacatcgcatgaaaaaagaaggatatttcggcaatttcggcggccgcttcgtaccggaagcgctgcgtccccccctcatggagctggaggaagccatgaactccatcatgccgtcccgcgagtaccgggacgcgctccaggatctgctggtccattacgctgggcgtgaaactcccctcacgttctgtccccgcctttcggaagaactgggcttccgcctgtggctgaaacgggaggacctgctgcataccggagcccataaaatcaacaacgcccttggccaggctcttctggccaaaatgatggggaaaacgcatctgattgcggaaaccggggcggggcagcacggcgtggctacggctacggcggccgcccggcttaacatggactgcgccatttttatgggcgcagaggatgtagaacgccagtccatgaacgtcatgcgcatgaaactgctgggagcgacggttttcccgattgagagcggttcccgcacgttgaaggatgccatcaatgaggctttgcgctactggatttcccatcaggcggataccctgtattgtttcggtacggcggctggcccccatccgttccccacattggtcaggcagcttcaatccgtcattgggcgggaggcccgcgcccagatgctggagcgcgcaggcaggctgccggatgtggtggtggcatgcgtgggcggcggctccaacgccatcggcatgcttcacccctttgtggaggatgaaggcgtccgcctggtgggtgtcgaggcgggaggcaccggtgagcccggctgctataactccgcccccatcaatctgggcagtcccggcgtgctgcacggccatgtgacgatgcttttacaggataaagacgggcaaatacagccgtcccattccatttccgccgggctggactatcccggggtaggcccggaacacgcctatctggcggaaacggggcgcgttcattacggtatgatttgcgacgcctccgctttaaacgctttccagacgctcaccagggaggaaggcatcattcctgcgctggaatcctcccatgccgtggcctgggtgctggaccatgcggaggaattgccgcagggaggggacgttctggtcaatctctccggccgcggagacaaggacctgggaatcgtcaggaaatatatcaatctttaagccgcatcatttccatgaacaacatgcagaaaacaccgttacaggaagccgtggaaagggcccatgcccttggcagacgcgccgttattccttttatcaccgccggatttccggacaaggattctttctggacccacctgtcccgcattgacgaatccggcgcggatattattgaaataggagttcccttctcggaccccgtggcggacggcccggttattgaacaggcatcccgggatgccctggcccgcggcgtcagcctgaaatggattctggacggcctgaaagcccgtaagggctgtttttctgccaagctggtgctgatgggatatgtaaatcccttttaccagtatggcctggaacagcttgcccgggatgcggaggaggctggcgtcagcggtttcatcgtaccggatatgccgctggaggaatccggaatgttccgggaagttttcagcccccgtggcctgacgctcgtcactctggtggctcccaatacttccgtggaacgcatgcgggaatacaagccttatacttccggcttcgtttatgtggtctccgttctgggaaccaccggagggaaagccaatctggagcagagcgttacggaaaccatgcgccgtgcgcggtccgtttttgatgtgccgctggcgctgggcttcggtcttcagacgccggaccagctggagacgctgccggaagatgcccgtccggatgccgccgtgcttgggagcgctctgctcaggcatattggagaagggaaggacgcctgggaatttttgggaaaatggaccagaggttgaaccgcgcgtttctccctggcttttaaggataggcctgcgcaacttattgtgcaggcctattttattttatctggtaatagattatgaaaatacggattcgcaatccgcttcgcttttattcacatattattcaattttctaaataaaaattgtattgataattaatatgttattatcttcagcataatctgtcggagggaaatctggattttctttgacggaaggaacgtcccggatattccggaaaaccgttgtaactgcttcttttcctttgacagcggattgcgaattccttatttatattcacaatcatattccccttgccgtgttgtgggaaagggtcttatttgtttcattaaatacctaattatcaaacgttacatgaaattacacctccctttgaatttgttggctgccctgatgacctccttttccggagtaacgcttggcactgccacgctggcagcagtttctggtcttttgatgacagcatcacagtcttatgcggcggatgtagcctttgacggaacgcaggtgaatgtggcggcgggaggtacggcctcctatgacattggtactgtcacggcttctaccaccttgaattttgccggagccggcacggccaccatcaccaatttgaacggaacggccccggaagccatactgacggtaaaccgcgtggccagcgggggcgccagcctttccacgctgacgttgaacggagcaggcactttcaatggaatcatttccctttattccaacacgacgggaggatcacagaataacatcctgaatctcaaccacgcgcaggctgcccaatactccacgatcaagctgggcggccacggttacacgacgggagcttccgtcctgaaagccggcgtgaacacttccatcagcaagctggagcacaacaataccgcggctctgatcaccggggaggggactacgctgaccatcacggggaattcttcctcctacggcggcagtttcggcgggaccgtgacagtggactatacggggggagggaccttcaccctgggcaattccaacaagggtacggcgcttacgcccgcgtcctctcctgatgccactcttaaaatcagcagcggcactctttccctgttttccggcaatgtcacctggtcccagaaactggtgatgggtgacggcaccacgctgaacgtacaggacggtccttccgtggcggggtatgccggctataacgccacttccgtcaacagcggcggttttaacttttccggagcgacgacgttcggcagcggcgtcaatctgacttccagctggggcaagaacgtgaagttttccggtgttcttaccgcggcaagcggtttctccatcagcggcggcgcgaatgaatatacctattacaacctgctcaatgcctccaatgaaattggagggacgattgccgttacgcgtaacttcacctccctgggaattagttcttccggctcccttggcaatgctgccgtaaccacttccactggttcccagtatgtgacgtattatggtactgcgggagaaacggcggatgttattggcaactccatcaccggagccggcaactttgttgcccagtcgggctgggtgcatctttccgagaacgtagcgcttacgggaacctataccgtcaattccggcgccgttctctccaaggtcggctctatcaacgccgctcttgccgggggcagactggatgcgggggccggaaccatgaccgtggcggggctgtcgggaaacggcgtcctttccgcttctgcgggcaccatgcatttccaggacgccttcacggtaggggaaacgatgggcatccttgccaacggttccggggagatcacgggcaatgtgacggtggatggaggccgcctgtattatacttccatggacaatgtaggcagcgtgctgcagaacgtgacgctgacttccggcctcattgatttctccggttttcaggaattccaggacctgttcggttctgaagccctggtgaacacctcctataacctgggcgttgatctgggggctggcttcactttggcggatattgacgaatccctgtacacgatcagtactgtggacggaaaaacagtcatcacctttacggcttccggagccagcgagaccgtctgggacccggcctgggggctggaagaggctccctcttccgctaccggcatactggcgaaccagcagaatctgtccctttacggtatccggccttcttccatgcaggagggattcggctccgtgaatgccgtcaccggaacgggagacctgacgggagtgacgctggccggcggctactacaatacagccaccaatgccacggctacgcaaattaccaccggcatctggacggatgtgctgggtggcaattataatctgattatcggcggcagctatgccaataactggagcggttccgggaagtgggacattacgggggacgtccatacccagattcagggggacacctccgtcaactggatagtgggcggcaattacaaggacggccaggcggcaggcattacgggagacatttacgtatccgtggacgggaatgccgtgatcaaaggcagtttgataggcggcggcacagccgcccataattccgtaaacaaccttgacggcagcacgcacatcgtcgtgcgcagcatgcagagcgtcacggacgaaaccatttcgctcaactccgtcgtccggggcttcatcatcggcggcagcgcttatgaagccaattccgcgtcccgcgccgccattaccggaagcaccaatgtgacgattgatttgggagaggcatccggcaattttgtcaagagcatcgtgggcggttcctattcgggaggttccggggcatatacgataggaggcgattccaacgtcagcatcaccgctgccagtgacgccgtctttaccgggtctgtctatggcggcgggtacagttcttcaggaacatccaccgtcagcggcaattccagcctgacgctggatgggggcgcttacgcgggcgctctttatgcgggcggcgggggaacaggatcctccgtaaacggggacgctacccttaccgtcaagaaagcagtattccgtacgggcagcacactgaatgcatcggagggtacggtaggcggcacctcttccttgcttctgggcggttacggcaatacggcggaccatgccatttccttctccaatacggctgtgaccggttttgacatcgtgaccatgttccaggattccttctttacggggaacctgaacatggccggttccagcgtgctggcgctggcgggcggcgccggaacgggaatcagcgtggacggtacgttcgctctttccgctgaaggagaactgaatctggatctttccgaattcggcaccctgacagacggcatgtccgtcctttcaactacaggcttgtccaatatatcctccattaaggcttcctttgctgacggtgtggcgggaaccatcaccgtttccgaaaacggcaaagaccttgtttatacggcgggaaccctcctcttgtgggcgggcggtgaaagcggaacctggagcgcggaaaacgtctggacggatggcgacgcccccgcctcgtatgaggacggtctggcggtttcctttgcagaccaggccggagtctctaactctgttgtacagctggattccgaggtttcgccaagctccatgcttgtccgcaactccaccacccgttatgaattgacggggacgggagaaatagccgatacggccattaccaaggaaggaacgggaacgttggttctcggaacctcttccatattcggcgagggtactactgtagccgtgtcgcagggcgttctggcatttggttatgatacggccctgcctggcacgggggtaacctgggaggccggttctttcctgggagcggccaatggagcgacggtgacggtggatttgggagccgtcgccaacccggtattctccctttctccggatgccggttcatcgatcgctctggcaactccgtccgacatcgttttcggcaatgccatcatcggggaaggaactgtccggaaaaccggcacgggcttgttgaaactgacggggagcaactccggccacatcgtggtgcaggaggggtctgtccaggtggggaacggaaccgcgtccatccgctggggaggcgccggttcttccgtcaccctggagaacggcacgtccctgattattgccggcaacagttcgggaaattcccaccacaccattggttccgatttgattttaggaacaaacgcgtctgatgccgtttctctgaaatgggtggacgcttcccaggcaaacgcaaccaattatcagcatgactttacgggaaccgttaccgtcaacggggcagtctctctggtgggcagggacaactgggccaaggaaatggggttcaccgggacgctcaccggagccggttccctgacgtacagccgcggagcgggcgacggcaggtacaatgccaacggcaaactcatcatcagcggagacgcttccggatttaccggaatgatcaccatgaatgcctcaaacggctacagcgccgggctggatctgcgcacttccgtttctcaggggggtgtcactctgacatccggaacggacactaccggatttgccttcatgcgcgtgctgggggatgttgagattgcctctctggacggaacggcgaattcccaagtgggagccgtaggcggcgcgcgtacgttgacggtgggatccggcacgtacaacggcacgctcacagaccgcggtattgttcttgcgtacggggccacttccattgcgtatgacgaatccggcgttttgtccctgaccaaagtcggcgatgagacgctgacgctgggaggaccggtcagctacacggggctgacggatattcaggggggaacgctcgcccttactgcctcaggggctacttccctgcggaacatcacgatggcggccaatacgcggatgacgactgcgggcgctttaaacctggctgccaacgccgcgctgacgctggatatcagctcctcgctcggagtgggtggggctttcggctccggaacgttcaaccttacgctgaacgggcttgaaggcattacggaagccggggaatataccctgatttccgccgccagcggtcttgattccgccagcgccgtctttaactgggccgggtatgtcggagacgaaacgctgatttacgaactgcagcagaccaatactgcccttaagctggtagtgacttccgccggggacgtgtggatctggcagggaacggaaggcgtgaactggagcgatacgaacacgggcaccatgtggggcattgaaggttccgcggaaacggctgccgggaaggatctgatcttcaacacggccggagcgggaaccgtcaccctgtccggggcggtgaatccggcctccatcacggtcaacaacgccgccggcagcgactatgtcttcgtttccgacggctccggaaaaatcgcccagggaacgctgaccaagcgtggcgaagggaagttgacccttaatttggacaacacgggctggaacggggatatttccgttcagcagggcgaactggtggctcaggtcgccaactccctggggtccggcgccattaccgttacggacggcatgctcacgctggctaccgcggaagttcagccgggaatgggcatgatcaacctgcagggcggcagcctcaatctggcttccggttcttttgccacggcgtttaccgcagacaacatggcctggacgggcggttccatgatactgggcggggaggtgaccgccaccgtcgccaaggctctggccaatggaaaaactgtggaactggcggacggttccgtactgacggtcagcggggctaatgacaactcggcgctgaacctgaatgcttccggcactggtaccgtttccgtgggcctgggaaccagctatggggccaatgttctgaacatgagtacggaattccaggggatcctgtccgtgacgtccggctatttccagttgaacaacgtaacgatgggtgcggacggcacgctgaaactggcggattccaacgtccgtacggaatggaacggaacagccggaggaacgtttgccaatgacgttgtctttacgggcaaccaggtctttgccaccaaggatttcaccttcagcggcgatttgagcggaacggcgttctccacccagggcgcgggcaatattaccctggcgggcggcgtcaacctggacggtcagcttaaggtgcaccgcggcacggttaccgtgaattccgccaatgtggccaaactgggggacagcattgacatccagaacaactccacgctggcctttgcccgcgatttctcctacggaggcgtcatcagcggcacagccggcagcacggtatccgtaaacgccggaacgctggaactcaccggagcgaacaccttcctgggcgcactctccattgtgggcggcgctacggcgcgtctgggtgacgggagcgcctgggccgggtccctctccggagacggttccctggtcatcgatactgccggagagataacgctggcggccggcaacaccgggttcaccggttccaccaccctcgcgggaacgggcaccgttactttgggaggggctgactccctgggggccggacgggtcaccgtcaataacggcgttctcaatctgtcctctctggatgcggccaacgtcattctgattacgaagggcagcctggaaaacgcggaagccaaaaccgccgggaatgtggaagtggccgcttccgccggaacgcagggagacctgaatacgatcaacctgggcggtttgtccggttccttggtcggctccatcgtcatggaggattactcccggcttacaggcgtttccggggctctggacatgacgggcaagacggtgacgctgaaactggattccggcagccttaccgcgggcggaacaaccggacagggcgtcattgatgcggacagcctgacgctttccgccgccgacacaaccatcaacctcagcaaccagggcgttctggacctgcttgccgccaaccgggattccactgacggcgtagggcttgtactgacaacgggaaccctcgctgtggacaacttcaagcaaatcggattctctcctctcctggcttccctcggctataccgtgacggaagtcctgggtgcggacgggacgctgatggtcagcggcaatacggaccttgtctatctggtggacaccacccccaattcagacgaccccaatatcagcgattacgccgcgctggatccctacaaggctgtcggcattaatggcaccacgcttcatgtgagcctgaacggggctccggaagcctcccggaacggggacggcctgaaagtcagcaacctggttggcagcgatggtgcgctggtcgtgacgaatacggcggatgatgcggcctccaaccacgccgtggtggatctggttcagaacgttgacgccggcggcaacagctacggcggaaccatcagcggggaccatgtggattttgtcaagaaaggtgcggaaaccctcaccgtggaaggcaacttcaccgggaatgattccatgctcagttccgcggaaggaaacatcgtcctgaacggtgcaggcaatagccttactgcgctggaactcgcgggcggagacataacgctgggcggacggaatgacggcgcctcccgtgtaaccacggtggagacgctggctgccggcgcgggagggggaaccctgaatttgggtaacggaacccagatggttcttaccggccagcaggccggcagccatgtcacggaggtgattatctccggggacggtacgctgaccttgggaggtacgggaacggactcctccctgacactgggcaacggctcttccctgaacggtgtcctgctggatatccgtgaagggtccgccctgtccgccgcaaccggttccgtgaataccgtttccggactggcgggcggcggagctctgaagctgagcggtgcggaaatgacgatcaattcttccgcttcccatgcctttaccggtacgctggacggggcatccggaacgctcaacgtcaaatccggcaacggaagcgtccagactatcaagggtgcaggcaatgcaggttatcacctgaatgtgagtgacggcggcgtgctgaccctggccggagcggcaggggagggcggcaatcccgcccaggcttcctatcaggggattaccgtgaatggcggcacgctcaatatcggcagcgcggacgatcccaaaacccagctgacgcttggctcggacggcttgagcgtgacgggggacagcacggtggccattaccacttcctccacaacggtggacggcctgggcaatccctttgtcacctccagcggaaatattacgctgggagacgggacgggggaagtcacgctggtcatgaacaatctggataccctggtttccgggagttcggaaacgctgaatatggaattgttcaagacaacggacggcgcgcttgtgtccctgggtgacaatgtcaccctccaggatatgattcttggttccatgtatgaaaacctggagctgaccaccaatgacagcatgacggccatcatcctcaccggtacggcgcgcacggaaaacattttccgtgactcttccctgacgcggaatgccgccactggagcggacatcctttggaattcccgctatcacatggaagaaggcactgccttgcgcgatttctatacctctgttcttctttcccagaattcaggcgactattccggcgccgcccgcaaactggccgccgccgccggcagcacggttaccagcctgggcatcgcccagcgcgactccctgcgcgaccagatgggctggatacgcaaccgcgtggcgcagatgggcgttaaccctgcatatgtccatgaagacatgccctacttccatatgtggatgcagggaaccgggtcttatgccaagctggacaccaggggggatgaaagcggctacgaactcaccacctggggaggcacggtaggcatggacgtggatatcaacgaccgcttcactgcgggagctgcgtttacggccaattacggaagcctgacggccagcgcggcggatacggcggacggagacctggacagttactatgtcaatctgttcgcccgctaccagtaccgtaaatggtcccatctgctgattctgacgggcggctggaatgatgcctcgctgacgcgcacggtggattacggtacggggtcttaccaggcccgcggcaatacgacgggagccggtttcggcgccatgtacgagttggcgtatgacatcgctctcaatgaagacaggagcgtgattctccagcctttgttcaacgcttccatcgtgacgacccgtatggacggctatcgggaaagcggttctgcaggaaatgccggactgaaggtggaagaccaggaactgactacggctgctgtcgctgtgggcgcccggctctccggactcatggggtccaacgtcttcgggcgtgaagcgctgggagaagtacgggtgaacgtttcccaggatatgggagaccgccgcgggcaggccaatgtgggcttcttggcggatccctcctatacgcgtccggtgtatggcgccaaggtcggaagcacggccttccagattggcgcggggctgagcgttcccgtgggcactcagggcgtcatttttgtggacggcaacgcggatatccgcagcggttccagctccatcaacgggagtatcggctaccgctacaacttctaaaggaaaaaacgtcagccaattggaaagccgctgcggaatcatccgcagcggcttttttcatgaatggacgggatttctttaaggataacttcaagcttgggttgacttccctgatggctgtttacttccattcccattcaatgggcgtttccagatcgggccgcagcgcctggcgcacagggcaggacaaggcggttttttccagcatggcgcggagagggtggctgccttccaggggcatgattgccttcagttcaattttttcaattcccttggatgattccgccgcacgcgccagaacgcgcatgcctttcaaatccactccttttctggccgcgaccacggaaaccaggctcatcatgcaggaggcgagcgtggaaccgagcaaaactccgggggaggggaattctgcgcggccttcaaaagaagcgggcaggtccgtggcaaacgtaacgttggaagggataaaggtggtttcgcagcggaattgtccgacgttttccgtttcggaggtgtaataatgatcagtcatgaagatgtgacagcgaaaaccctgttcgggttcatccggctcaggttattgtcacgttgaagagccgtgaagttccgctttgcaaggaacctggccgttccttcatgacatggttgatttttccctctcgcttccggttcccggcatcatttctttttaagcgctgctccgccgtgtcttcttgcggcggaaaaaagcttacgccgtccccttcggcttccttgcggccagaatgcgccggatgggttccgcataaagctccggctccagcaggaaggaatcgtgtcccttggtggaagcgatggtatggaactccgtgggaatatgggcggcttcaagctgcgccgcgaaatcctgctgttccgccgggcggaaacagcagtctgtatcaatggaaaagataagcgcgggaatccctgcgcggcggaagccttccagggcggtttgaaatgttccgtccggggtgtggtcgcggatgtcgaactccgcccacatatccgcaatgcggatataggagttggcgtcaaaacgttccgcgaacttggtcccctggtgaagcatgtagctttgcgtgctgcgggtgggggtcatccacgtgagcaggccgtagttgcctcccacctcttttctggcgcgctgttccagcccctcctggtaaacaaatgatttgtggccgatgatacgggcgaatgccagcccttttttgggcgccggcccccggtaataatccccgccctggaaatccgggtcaagctcaatggccaggatttgttcaaacagggacaggcggtgttcaatggaagcccggtaaccggagccgatggagatgaagctccggacgcgttccgggaattggcacgcgaaactgagggcgatcaggccgcccacagaggggcccataagatgaacgcgttctatgcccaggctgtccagcagaagggcctggaggcgtgcctggtctgcgatctccacgtgagggaagcgggagccgtagggctggccgtccgcagggcagggggtagcggggcctgtggtgccgtagcaccctcccaggtaattggcgcagatgatacagaagcggtccgtgtccagcggcttgccggggccgatgatgctgttccaccagccttcgtggttttccggtttccagagggagccggtgcccgggacttccggattgtagccataggcgtgctggctgccggaaagggcatggaacagcaggatggcgttgtctttttccggcgtcagggttccgtactgttcataggcgacgcataccttgtcaagcgtagctccattcctcagggagaaggagttgggaagattcaggaatttggtttggacggcaggaagctgcatggatgtacggaaaagggcttggtcagcaaaaaaagaccggcacccggcgggcggcggtcttcttgaaatctgtgctgggccagggattacttgacgccctttttggaaaggcgcgtgcctgccgtagcgccctggcgggccttgaacttgggattgctcttgcagatcacatacagcgtgcccttgcgcttcacgatttggcagtctgcgtggcggcgcttcatagaggctaaggaagaaagaactttcatggtgtataactccggtttggtgttcggttcgggagacggaatataccgtttagttaagaattgtaaagtcatttctttgccaaaagtaagatgccgtctccgcagagatgcttttatgaggaagatgcagtaaagcatgggatggctttggattccgcgccggcggaaaaatttagggaagacgtcatttatccgagaaaataaaatgcgggaagggacctcagccgggggaataaagggtttgtggaccggaggggattcgtataacatcttttccggttttccttatgactgattcttcctctcctgattcctccccggcttcccggaatacgtttgcccatcatttgggaatgaaagggtttctgctcatggaagggctgttgaagctcgtgggcatgaaaacgctgtaccggctggggcgcgcggcaggggccgtggcgtggtatctgcttccccagcgccggaacattgtggaaaggaatctgcgcatcgttttgaatccggccctgcgcggaaaggaactgcagaaattaagccgggaaaatttcaaaaggaccattgccaatttcctgtgttccgcgaagacggccaccctgacggatgagcagttgaagcattgcgtgacggtcggagggcacgaacagtttgccgcgcctgtgctggaagggcgcgggcaggtttgcgccatagcccactccggcaactgggaggcgctggcgagaatacgcgcattttacccggaggtggagcgttacgggtccatgtaccgccagtttgacaatccgctgatggaggaatacgtgtaccagcggcgcacggaacgtggaactcagatgttctccaaggagggcggcatcaaggctcccatgaaaatgctcaaggaagggggggccctgggcgtgctgagcgaccagttcgtatgggagggggtgtatgtcccctttttcggcaaggtgaccggcacgactccgctgcccgctctgctgcgaaaaagggctggcgcggacatggtggccatagcggtgcgtacggatgctcccggccactggatagcggatatggggaatgtggtggatttttccgggtcggacggctctctggcgggggatactattgaagtgaacagggggctggaaacattgatccgggaatccgtgctggatgtgttctggatgcaccaccgctggaaatccgttgaccgttttgctccgcaggataaaaaaacggctgcgcttctggaaaatatggagctgaagccgtaccgcattcttgtagccgttcccggggcgttggatgaagccctggcgaccgttcccctgattcgtgccctgaaaaccgtccggtgcgacatgcaggtgaacgttatctgcccgtctgcccagatgggaatatggaagacggtgccggaggttacccatgtgctgccgcacgattccctgaagcagcttcgggaagctttggtggcagatgaattttacaatgacggcccgctggatatgggcgtcatgctggatggagatatggaaaccctgaaagcgctggaaccgtatggccccatgatgttctccgggctggacacgcatcccggcgtccggaaatacaaattccgggtaaaggcccccgtcctgcgcgccgcccccccggcgcaccgggtgcagctttatctgcaattgggggggctgcatgggctggacgtcggtaaaccgtctttgttccctgtgaaaaaagcggccccggcggaaggcgcccccattttaattgctccgttttcccgtctgggaagcgccagtgaatggagccgggagcagtggacggaactggtttcccttttgccgggacggacggttctggtggctctggaagaagaccgggagcgcgccgccgcgctggcggaacatttgaatgtggaactggctgtgggtgcgccggaggctctgttttccgtcatggacggcgcttcggtggcggtagccgtggatggcgatttcccgtccctctgttccttccgcgggcttccggtggtgactctgttttccacccggcttccggatgtgtaccgccctatgggtacattcaaccgttccctttacagccaccagtgctgttccccctgcttccggaaggattgtgaccgggatgtcccctgcaaccgccacattgccgtgcgggaagtgctggatgctttgcgggaaatttccggaaaggaataatttgggaaaggggagaagggcctttcatccggaagatgaggaggggagatatctgtattcggtttgctgcggttgatggcgccaaggcgcgaaaatccggttaatgcacgcaatccggaaagccttcccgccggaaaatgccgcggacctgttccgccagttttgcggacgcttccggggtgcccttcaaggtataatccagcttcaattcatcccatttgaatctccccatctggtggaaagggagcacgtccacgcgttccacgttgcccaggagcgccgcatggcgggagagtccctcaatttcttccagattatccgtaacgccgggtaccagcacatacctcagccacacgggcttgcggagggaggccaggcgttccgcaaactccagcgtagggcgcagttccccgcctgtcagggagcggtaccgttccggattccatgccttgatatccagcaggaccaggtccgtatccgccagcatttcttcgcccgcattcacgcccagatggccggaggtgtccaggcaggtatgcagtcccagtttccggcagcctttcagcacggcgccggtaaaatcaggttggaagagggggtccccgccggagagggtgacgccgccgcccgccgcctgcaaaaaatcccggtaacgggctatttccctgaggacatcacccgcgcttctgagccggccccgccgaacgtaggaggtatccggattgtggcagtagcggcagcgcaggctgcagccggacaggaaaaggacaaagcggatgccgggaccgtccacggtgccgcaggattccacggaatgaaccaaaccggtgacggagctttctccgtccggatcatggttttgtggaaaaacctgcggcatccgtgtgtcgtccgggttagcgggtgtggaaggtgcggttgatgacctcctgctgctgttcccgggtcagcttgatgaaattcacggcatagccggaaacgcggatggtaagctgcgggtatttttccgggtgatccatggcgtcgagaagcgtttcccgttccagtacgttcacattaatgtggtgacctgtagcggcaaagtaggcgtccagcagggagacgagcttgacgcggcgttccctttcctccttgcccagggcctgcggaacgatggagaaggtgtaggagatgccgtccagggagtcgtcataggacagcttggctacggagagcatggacgccacggctccgttcctgtcccttccgtgcatggggttggcgccgggggcgaacggttccccggctcggcggccgtccggcgtgttgcccgtctttttgccgtacaccacgttggaggtgatcgtcaggatggactgggtgggcagggaattgcggtaagtgtggagcttgcgcagtttttccatgaaattgctgaccaggctgcatgctatgtcgtccacgcgcgggtcattgttcccgtaacaggggaattccccttccgtcttgaagtccacaatcagcccctcttcattgcggatggcttttacggtggcgtacttgatggcggacagggagtccgccgccacggaaagcccggcgattcccgtggccatcgtgcgcaggatttccggatcatgcagcgccatttcaatgcgttcatagcagtatttgtcgtgcatgtagtggatgatgttcagcgcgtcaatgtaagttttggcgagccagtcctgcatcttgtcgtacagggccatcacttcatcatagttgagaatttcttccgtgtagcggggggagggcggggccacctgtttgcccttgagttcatccacgccgccgttcagggcgtagagaaggcacttggcgaggttggcgcgcgctccgaagaactgcatctgcttgccgatgcgcatggcggacacgcagcatgcgatgccgtagtcgtcgccccagtgcgggcgcatcaggtcgtcgttctcgtattggacggaggacgtttcaatggaaaccttggcgcagaagcttttgaaggcttccggcaggttccgggaccacagaacggtcaggttcggttccggagccggccccaggttgtacagggtctgcagcatgcggaaggaactgcgggtgacgagggtgcgcccgtcctctcccatgccgccgatggattccgtcacccaggtggggtctccggagaacaggttattgtaatcaggcgtgcggatgaaacggacgatgcgcagcttcatcacgaactggtcgatgatttcctgaacttcctcttccgtgatgagcccctgttccaggtcgcgggtgaaataaatgtcgaagaaagtggaaacgcggcccagggacatggccgctccgttctgttccttcacggcggccaggtagcccaggtacgtccattgcacggcttcgcgggcgtttgcggcggggcgagtgaggtcgcagccgtaggaggcgcccagctgggcgagttcttccagggcgcgtatttgttcgctcatttcttcgcgcaggcggatcagctcatccgtaaggggggaatgttcacggtttttgaggtccttgcggcgttcggcaatcagtctgtccgtgccgtacagggccacccggcggtagtccccgatgatgcggccgcggccataggcgtccggaaggccggtaataatgccggcggaacgggccgcccggatatcggaagtgtaggcgtcgaaaacgccttcattgtgcgtcttgcgtatctttttgaaaatatccgcggttttctcgcacatcttgaacccgtaggattccagggcctgctgggccatgcgcaggccgccaaagggcatcagggcccgtttcaggggggcgtccgtctggaggcctacgaccacttccagttccttgtcaatgtagccgggcttgtgggaggtgatggaggataccacttcttcatcagcatccagaacgccgccgttgtctatttcccttttcagcaggactttcagttcatcccataaacggagcgtgcgctgggaggggccggaaagaaattcttcattgccggaatagggcgtgtagttatgctggatgaaatcccgtacgtcaatggactccgtccatgctcccggcttgaatccctgccattccttcggaagggcggtggactccttcaagtcttttactatgctgatcataaataggatgtagtgaagaagaccggagaaaaacgttccgcagccgttgaaaggccggaaacggcaaaactccgcgccacgtaattatatcgtgaattccgggagacaacaaggctaattctttgcgaagagaacgcgggtgcgctggctttggcatgtttcacctgtctgtccgttgcggagcggaaaatgaggggaacatgcgattgcggaaaagtgacggaagattatttctctttactttcctaatctctattgcagtatctcaacgcttaccgttatgaaatcttatgcatgcctttgtttattgctggcgggagttttttgcgttgcttgtttctccggtgcctgtgctgatgaattgccgcccacgctgaagccccaggagaaccagcgggccgtgcatgactggaaaaacgccatgaggcagtgatggaacggacccggaccgtcaaacgggggtatgtcgtttttggtgaaagcattaccctccgttggggagtcgagctttcctggggcaacagggctctcggaacaggaaaggccggatgcggtgttcgcctggccgctgttgcggcgggatttgccggacgggcagtggtcttttttactctgccggcaaaagtggcgcctgcgatcttgatgcacggcaggatttgcttaaactggaaaccggtttcacttttttatcatgaatttcttctcctacatgctcgccatattgctgggggggccagtgtggcgttttccgcaccttccatccctccctccgcgttgcccgcaaccctgaagccggagccccatcagcgggatccgtatgattggaatgcccggcatgaagccgttaaaaaaagaaaccggaccgtcaagcctgaatatgtgatgataggggacagcattacccaccactggggaggggagccttccggggacggaaaaaacacgggagcgggttcctgggagaaattattccgtccgcatactgcgacgaatatgggctttggatttgattatgtggataatgcctattaccgtgtgcaaaacggggagctggacggcatttctccgcgggtcatcatcgtgctgctgggaaccaataatctggggcaccgcaaggatacgccgcaggcatgtgcggacaatatcagggcgtttgtccgcctggtgcgccggaaatgcccctcttccaaaattctgttgctgggcgttcttccaaggaaggagaaaaacctggcggaaccggtgaagcagacgaacaggctgctggcggagctgcataacggaaagaacattttctttgccgatccgggaaaggctcttctttccgcagacggtgcttctcctcagaatgaatttatgaaggatgtggtgcatcccaatgccaggggatatgaggttttggaaaaggaactggccgtacttttgaaaaagcttgatgcaaaataccggggagggaagcaggcgggaaagcattcctgatgatcgtcttctgatggaaggcaggattttgcttgaagggaaagccccggctgaggaaaatatacggcatttgatatttagtttatgaaaaacctgttgtttgcattgttgaccggttccttttgttgctgttatgcccaacagaaggcagcacccgttccggagcctgaagttgtcgccactccgccggctgatgcggggcgcggcctcatccgtgtggactcccgtgaaatacgccattattccggtacccgcaagggaccggattacctggtcagcagggataacggaaaaacatgggaaatgaaggccgctccggctggctaccctcccaactacggcggcattcccaaggaatctccggctattgtgcgcaaccccctgaccagggaattcattcgtgtgcagcctatcggaggctttgtatttctttccaagggggggctggacggcaagtggtttgccgtcacgaatgacggcaagctggaagaagactggaaagatccggaaaagaggaaaaatctgaaaaaactgggcggcatcatgcgcacccctgtttttgtgaacaagggccgcagggtgattgttccgttccacaacatgggcagcggtaccaagtttcatatttccgatgacgggggactgacctggcatgtatccaggaacggtgttacttcccccaaacatgaagccaggcccccccaccagggtgtcagatggttcaacaatgccgtggaagccacggttttggagatgaaggacggttcgttgtgggcgcttgtccgtacttccctggaccaggcgtggcaggctttctccagggattacggtgaaacatggagcaaaccggaaccttcccgctttttcggcaccctgaccatgaatacgttgggccgcctggatgacggaaccatcgtttccctgtggacgaatacgatggctctgcctgaaaacgccacagccggcaacggaacgtgggaagacgtgttcacgaaccgtgattcccaccacattgccatgtccggggacgagggtaaaacctggtacggattccgggagattatcctggacgaacaccgcaaccatcccggctatgctacgctggatggtccggaagaccgcggcaaacaccagagcgaaatggtgcagctggacaaaaaccgcatccttatttccctggggcagcataaaaaccaccgccgcctggttattgtggaccgccgctgggtaggggccaagacgcgtgctacgcagacggggaaagattcggattcccagtggaccattcatacttatattccccagaaaaagggccattgcagttataaccgcaagccttccgcagagctggttccggatccgtccggaagtacgaaaaaggtgctgcaaatcaagcgtctgaatgatcccgaactggtcaatgaaaaatccaatgtggattaccggaacgctggagctgcctggaactttccgaacgggaccacagggctggtcaaattccgcttccgtgcagcggacggggatcaggcggatgattccggccttcaggtctctctgacggatcggcttttcaatgcctgtgattccactacgaaggattatgccctgtttaccttcccgatcaggctgagacctgcgccccatctgctgctggggatgaaaaaagtgcctttcacgcccggcgcgtggcatgaaatttcccttctgtggcagggggggcaggctgtggtgtctttggacggaaagaaggccggaacgttgaaaatggctaataagtcccccaatggagccagttatattcatttcatcagcaccggttcccaaccggatgccggcattctgctggatacggtgaatgcccgtgtgaaataaacggcggtattcaacggttttccttcttcggaagcggcggagcgctcaattccggcaggtatttcagcaccatttggagatgttcgtttgaccggttgcctatccgctggagggctgtgcgtccgtatttgtctctcagggaggggtctgcgcggtggtccagcagaagacgcgcaatacccagtttcagccggtccagggaatcgtctcccagcaacattcctcggcagcacgccatgaggggagtctctccggcggcgttttgatggttgacgtccgctccctcgctgatgaagagactgaccagctccctgatttgagggagctgggacacatcaatgaaagccagctggcggcacaggttcagcagggccgtgtcccccgtggtttccggcagggttgtggacgcgggcatggccgcattcacgtccgcaccgtattccagcagaatatgtgcgatttgcagtgcggtgttcggagtgttcaggttcagggaaagaaggggcgggaccatttccccgcggaaattgggatcgtacccggcttcgcaaagcttgcggaccagcagggggtatccggcggccgtggcccatgtgagcagacttgtttttttacctttcaattcaggctggagggaaatatccgcaccgcatttcagaagaaacagggctgcttcctcatagggtgctcctccaataccggccacacaggtgatgacgaggggcggccagcccagcggccccggtttattcacatccgcaccgtattgaatcaggagattaaggcaggagatcctgttatgcaccggcaggggcgtggagtcgtccatgcctggctggcaggcgtaagtcaggggggtatttccctgttcggagtccggaatggagggaaaggcctgttgcggcaggatgatctggacgttcgggtccgcatggcgctgtaaaaggcggttcagcaactgcacttctccgagcccggcggcaagatgcagcagggtttcatgggatggagtgatgcagcgtccgtctgcgctttccgccgtgtcccgtatcatctgaagccgttccctgatttcgtccttcatatattggcgcatggaaacttcggaaaacatgtgccagtcaatatggcgtgaattgagggaaagcccgcggtaaatgaaacgttccgggcttcgatgggctgtgaaattcgctacggtaagaatttgttctttttccgcttttgtccagatagggttgaaattccattccgcgggagaagaatcattcctgttcagccagaaaacggcgaaagtcgcggcaagagaggcaaaaaagctcaaagctccaagaaaccagagagttttctttcttaaagtcatgtgtatcataagcaggggtactgcgaaaggccatgatgcaggaatccataactccgggcaatgaaaaaatagtatgagcaaagaatgcccggggcaaaccatgtgggaattcgggtggcggattgcaaattcggaggagaattttttcctcttcatctgggaaaaaagctcgtagataaagagaattacgaaggaaacggaaaatatggtgtcatgggccggacttcacaaaaattatggagtttatggcgtggatcatttaactccaattatttgaattgtatccgaatttgcaattcggtgtgatacgctaaatattgcggatgtgcggatggtttcaaattatttgcatttgccgctgctgcactcacggtagaatgaaggaagctgaaacttatggaagaaatggagattctcccgtaaaatgatggagagaactgtatccttgctgctggcctcctggtctttcctttcgctgtccgctccatgctgtctgaagccgctcttgccctggaagtaaggataaacgatgattctggcagcgttatggattccgtcaaacttattgcgtccgatatggatgggacgctgcttaatggaaaaggtgaattggaccctgcgttttttcccttgtttagggaacttgagcttcgcggcattcgttttgcggcagcaagcggccgccagtatgacggattgctccggacctttgcccccgtggcggaccggatgctgtttattgccgagaatggcgcttatgcggcggcgggtagaaaagaatggatgcttctggacatggatcatgaaacggtagccggtttgattgccgggatcaggtgcattgaaggaacctgcatcgtcctcgcagggcgggattccgcatatattgaggacaaacagccggaattcgtccgggaggcccgcaaatattacacacgctgtcaagaagtgggggacctgctggacgtgcggggagacaaacttttgaaaatagcagtatatgacttcctgggagccggggaaaacagttatccccggctgaagcatttggaacatggcttccaggtggctgtctccggagagaaatggatggatatcagccggaaaggggccaataagggggccgctctggaattgattcagaggaaactgggaatttcttcggaggaaacgatggttttcggagatcagatgaatgacgcttcaatgatacggcaggcgcgtttcagttatgccatggcgaatgccgtgccggaaatccgttccatggccgcatttgaggcgccgtccaatgaggaaaacggagtgatgcaggtgcttggaaagatgttggacgcccattctccgcagggaagggccgggaattgcaggaaaccccgtctctaattgccgggtaatggaataaaatcagggttatgttgatgttattgtcagatttttttaatatgctggcgatggccgtgttcgcttgcattggcggtgtttttctgggaatgggctttctgctgcttaaattggcgggaatttttttcggaatattggcggggtgtattattctgatggaagcggccggaaggtggatttcccatttgatgggggcgtgagtccgttattcccggcaatgaaggggattcctgtacgctttccgtgaggggagagatttctgatggctgggccattgccggctgctgttgttgccggttcattgccgaatgctgaagtggaaggctgcatcctgcctggattctgcgtgttaaaaccggatagcggagttttgtgataaacagacgtttgccgtaagatgccctggaagacagagccccgcagaaaggaagtcccaaggatatgaaatgccgggcgtccccatggaagggactgttgcctttgtactatttgacagggcgggagacggaattttaccgtccctcccgtcagcatgaaagctgttgtcctttttagttttgcttttccgcaatgtctgtggtacacccgtgccagacgtcatgaatcaggaatttttttcagtgctcgtgcaggtggcggccgccctggggctggccggcatgatcttgttgctcagtatcttgatgggcaagcgttcttccgtgcgtaaaccggcggacattccctacgaatgcgggatgattcccatgggggaaggtgcccccatgttctctgtaaaattctatatggtggccatgctctttgtcatttttgacttggaagtggtattcctctacccctgggccgtcaatttccgggactatattatgatgaatccggaatcgttcacggccatgtgcattttcattggcattttgctggtggcctacctgtatgcgctgggcaagggtgccctgaactggcaccacgatccccgttgaccgtttttgttcccttttaccaacgccgtgttccatgaggaatacggcgttttttatgtgaaagaaaaattgccttggaaaatggcgggggagaaatatccgtaaatcctgtcctttttccggatgcctgtttgcgtgtaaaatcatattgtacaaaagatgatttctcttgccagaagagtggaatagggatagcgtttgcgcgatcaggaaattcatcatgaatatgcctcttcctaaaacgacgcaaggtgtttatcgtctgtcggtcagtaccttttattttcttcagggtttggtgttcgccagttgggcatcccgcatcccggacatcaaaagtgcattggggttgaacgatgccgacttggggtccgttctctttgccgtcccggtggggcagatgtccgccatggcgctatccggttacctggttggccgttgcggcagccggaaaatactgatggcggcatccgtcttttatcctgccgtgcttgtatgcctgggtatggcggggtctttctgggaactggcggccgggttatttttctttggggtagccgcaaatctgacgaatatatccgtcaatacgcagggagtgggagtggaacggctgtaccagtgcagcatcatggcccggttccacggtttatggagcctggcgggttttttcggagctttgctgggagctgccatggtggactggcatatttctgcggaaacgcatttcatcgccattttcctgatatgcatgattattctggccgttttttccccctctcttctgccgagggatgcccggcgttcctcctcccagggaggcggcatgttccggagcatggatgcttatgtactggtcatcgggctgatcgccttcggaagcatggtgagcgaaggaaccatgtttgactggagcggcgtgtactttgaaagcgtggtaaaacccggtccggggctggtgcagatgggatacgtggcattcatgagcaccatggccctggggcgttttacggcagaccgcctggtgatgcgcttcgggcctgtgcgggttctgcgcgccagcggcatccttattgcctccggattgctcgtctccgtcctgttcccgatgctgtggtccgccacgctgggctttctgctggtgggttttggcacctcttccattgtcccgctctgctacagcatggccgggaaatcccggaaaatgattcccagcatggcgctggcttccgtttctaccatcggctttctggggttcctgatggggccgccggtcattggtcatattgcccatgcttcctctctccggtggtctttctccctgattgccctggttggactggggacggcattcattgcccctttcctcaagaaatataggtaatcactgttaatgatatgcctatattgtgaaatggtgcgcctggcaggactcgaacctgtacgcctttcggcaccagatcctaagtctggcgcgtctaccaatttcgccacaggcgcaacgaatgggcggacgcactctgccataccaggctctggcgttcaagattaaacaggagtttttacctttgacgcgcttgtgggaagcgcctgtggtgagaacccataggaaagttagctgccctgttgggtgtctgctttctggcggcattttccattcatgggcggatgtctggttccccaaaggcgcatttactccggattagaagggggaggcattgagtatgtcttggtttgtctgccggtaaaggatggaaaatccttgttagctgattctgtgaaggaggttctggagaaaggaaagttttatcccaagccggtgttggccgccgctgatggttccggggcacagtgtttcgcgtatgaggagggcgatactgatgccaaacaacgaggcgtgagattaagaagattctcgagccagttaaagcagtcctgaaccggaggatggaatatcccagatattttccagggcaggcttatcccatgatttgtgccggaaaaggaaatagtttcacgaacaaaaagtccagcatccccaggcacagggcgatgcagacggcttttttaggggacaggagaggcgttgttttcagccaggcgacgatgccggcatgaaccgccagagagatgcccacagaccaccagaagaacggaatgcccgtcatggcgaagagggccgccagcgggtaggtgaatgccagaaagagtttcatgacagcttcccattcatgcccgcgtaccatcatcagctgcttggacagaagagagacatacaggcaggaaggtactacaacgcacagggtgagggaaacaacccctttttttgcataccgttcttcctgtgtgggaatgtacatgccgcatatactgggtcaggaggggaaaattgtcaaacattgtcctagcccggcggggcaggagcaatatactgacggcattgcgtatgtcgtcttttgagttgaattcctccttcaagccttccggcgaccaggagcaggccatcggcaagctgctcaagtctctggaggcgggtaacaagcaccaggggctcctgggagtgaccgggagcggcaagacattcaccatggcgaatttgattgcccggatgaacaggcccacgctggtgatttcccacaacaagacgcttgccgcacagcttcattcggagctgaagagttttttcccgaataacgcggtggattactacgtttcctatttcgattattaccaaccggaggcgtatatcgccagttccgacacctacattgaaaaggattccgccattaatgacgagttggaccgcctgagcctgaatgccatgaattccctgatgacacggagggatgtgattgtggtggcatccgtttcctgcatttacggcctgtccactccggaggattacaggaacctgacgctgcgcatgcgcgagggggatgtcatggaccgggacgtgtttttgaagcaactggtggaacgcctgttcgagcggcaggattttgattttacccgcggcacgttccgcgtgcgcggtgaggtggtggaggtgtttcccgcttattcggaaggtgaagcaatccgcgtagagtttttcggcgacgaggtggaacgggtttctttgattgactccgccaccgggcgtgtgagggaacggcttgggagctacacttttttcccggccaagcagtatgtggccgctccggagaaaagggcggcggcgttaaaggctatccgggaagagctggaggaccgcgtaggctggtttgagaagcatgggcgcctgctggaagcgcagcggcttaaattgcgcacggattatgatttggaactgattgaagagctgggtttctgcaaggggattgaaaattattcccgccatttgtccggccgcctgcccggaagcgccccatccaccctgctggatttctttcccaaggattcattgaccctgattgatgaaagtcatgtggcggtgccgcagctgggaggcatgtacgagggggaccgaagccgcaaaaatattctggtggagcatgggttccgcctgcccagcgctctggataacaggcctttgaaattccatgagtttatggaaaggcagaaccagattgtgtatgcttccgctactccggggccatttgaactggtaaattgccgtgcggataataagacgtatattcccgtgcgccgtgccgccagatccggagaaaaggctccggaagggttcaaaggaattttgtttacctctcccaaggacattcgcgttgctcccagcccatccacggaaccggtagaaaaatttgacccaaccaggcgttctacacccctgattgtagagcagattatccggcctaccgggctgctggagccgaagattaccatccgtccattgaaagggcagattgacgagacgatcgccatgtgcaatgaacgcgttgccaaaaatgaacgcgtgctggtcacgacgctgaccaagaagacggcggaagatttgacggagtacctgaaaggggtaggattgaaggtgtcctatattcacgcggatgtggatgcgattgagcgtgtggagattttacgtgctttgagagccaggaagatagacgttctggtaggcattaacctgcttagggaaggtttggatttgccggaggtttccctggtgtgcattctggatgcggacaaggaggggtttttgcgcaatgagacatccctggtgcagacggcgggccgcgccgcgcggcatttgaatggagagtgcgtcttgtttgcggatgtgatgacggattccatcaaacggctggttgagctgacggattaccgccggggtattcaggaaaaatacaacagggaacacggtattgtcccccagacggtgagccgttccgaacaggggcagttgaagttgtacgcagaggatgatgaagagtccttccgcgtagcggaggatgaagccgggtatggtttggaagagcgcattgccaggctggaggcggaaatgaaggaggctgcttcccatttggaatttgaacgcgccgccttgattcgggatgaaatcaggcagatgcgtggagaatatggaaaaggcaggggataatatccggcgtgatgaattggggatgagctttctggtaggatggcatgctgttttttcgtgatatttgtccatcttattcttggccgtcatttgacggtgatttggatattgggtttaacagttaattgcttaaagaattctgctgatgtgacgtcagtgttccggaccggagtccgctgtcaacgtgaaatattctaagaaggccttacaccgatggggaagtatatgaagggctctttgttccagtcttttcttatatataagaatttctcatgataagcacttgccgaagtggcaaagggtatggcggatgacagaggattcccaggctggcagcagtagctgtctgattatcctttgccggttatgttccccattttatttcttgatgcagccggctgcgtcaaaggcgccgggcaatgtatggtcaggaagggcccatttgccatcgtctgaagaaaagatttgcataaaaaatacttgcgtatttggaaaaagcctgtaatctccttccaccatgacccgcaaaggtggtatcaataaaacccgcaaggcagtcgccaagcgtttcaaggtaaccggcacgggcaaggtactgcgccgtaaacagggcaagcgccacatcctccagaagaagtctagcaagcgcaagcgccagcttggcaaggtggctctggtggacgagacgcaagtctgggcagtcaagcagaacctgcctttcgcctaaaccgcggaaacgctcgactaatgccgagctttccccccgctgaacggggggccttcatgcagccttcttccgatgagaagataagaacaggcgagactgcagggaggtgaggaagaacagtctgttcaagatagaaatagaaataagctatgccacgtgccactaatggaccggcctctcgcaagcgtcgtaagcgcattctcttgcgtgccaagggtttccgcggtttccgcagcaaactcttccgctacgccaaggatgctgtttacaaggcttggcagtatgaataccgcgaccgcaagcgtcggaagggacaattccgccgtctttggatcgcccgtatttccgctgccgtccgcgaccgcggtctgacctattcccgctttatggaaggcttgaaagccgccaatatcgatttggaccgcaaggttcttgccgatttggccgtctctgacgaaaaggcttttgacgctatcttcgctcaagcgaagaaggccattgaagccaaggatggcgccgctctccgcgcctgaatgtgcgggagtttccatctgttcagtaaacgttaaccgacagcctccggaaataattttccggaggctgttttcatgtccggatatgacagttccggccgttggcattttcctgtaaatgccttatggagcaggtgttcgcacgttcatcatttagtgcgccagccagtttctcttattgcagcgtcgattttcccatgccggctgggaaaaatcctgtttccgccagtgcgcatttttgttaagaacacaatggctctttaatcattgcttccaattccggaggcatttattgcaaaggctgttcagggattcggacagaaaagcgggctgcggcgtttgatgccccgccggtttttctcctggtaaaaaaggcgcttttattcgtccaggttccggggcgggatgatgccgcctctcccagaggcaccgctcgaaaaaaggggacgcggtcttttacctgcggcttcagaattcccggaaggtaaaggctgttttctgggctgtcaggcaccttttgaaatccatttggaatatcagcatccactttgtcattaggacatctttgaagcttgttctccggagaggcccgtggtaagttagacggcaaaaactaccatggatagcattctttccgtccttgccaccatcgccattattttcggcgtggtgatgttgtttaacttcatgatttttattcatgaacttggtcattttttcgctgcccgctggcgtggtctgtatgtggacaggtttcaaatctggtttggccgtcccatctggaaaaaaacggttaacggcgtgcagtgggggctggggtggattccggccggaggttttgtatccctgccgcagatggctcctatggaggccattgaaggacgtgcggagcttcccaaggatttgaagccggttactcccttggacaagattatcgtggccgccgccgggcctgccgcttcttttctgctggctgtgttgtttgccgtggctgtctggatggtgggcaagccggatgtggagatgggggtgactacggtcggttttgttgctccggacagccctgcggctcaggccggcattcttcccggcgacaagattgtgaaagtggacggccatcctgtggacaagtgggcgggcaatatggaaggcgtgcgggaattgatcatgctgggcgagcatgaccgggtggtttttacggtgcagagacctggacatgaaggagagatggaaatttcctgcggattccggattccggaaacgtcctggtggcagcgctccggcatgcgtcaggtggggttgatgcaggccatgccctgcgtgattggggaagtgatccccaattctcctgccgccctggccggattgaatccgggcgatgaggttacggccgccaatggagaacgcctctggaaccctgcagcactggatgttctgctgaagaagaatgaaccgctcttgctggatgtgacggacagggccggggttgcaaggcaggtgaatattcaggggaagcttccggagaattggcacaatggtgcggatggttccctgctcaagggggcccagcctattctgggcgtgagctgggacctgagttccgtgggccgtgacgttaccgtccatccttctccgtgggcgcagatcaagcagagtctgaaatggatgggggataccctggcgaaggtggtggctcccggcagcagcgtgggcgtggagcatctttccggacctgtgggaattgccaatcagttttacaagatgttctctctggaggaagggtggaagctggctctgtggttttccgtggtgttgaacgtgaacctggcggttctgaatattctgcctcttccggtagtggatggcggccatgtggtcatgaataccattgaattggttttccggcgtcccctgaatgtaaaagttctggaattcgtccagttcggctttgtgttcctgctgatggggttcttcctgtttgtgacattcaaggatgtgggggatttctttggcaagaagccggacaagctgcccgccccggtattcaaggccgtcgcggattagttgcggacggcgttttttatcccggcctgttccatgaagcagtcactggcggcgcgtttcctgttccgggcggtggtgctggcgtttcttgtgtatgccatgctgcttacctggtggactcctttcactggggacagcttcatgcattccgtgttcggggcggaccaccgccttgcttttcagcccgtgctggagcggtgctggtggtcatacatgcactggaatccccggctgggagagttcctcgctatttttacagctacggcgggaaaatggctttttctggccctcaatcccttcgtgctcctttccctggcgttgatgatgttttttctggcgcggggaagaaaggtcaattccggaaactggcgggatgtgctgctgtttaccgtgggagcgcttcttttgcttacgtcttcatctaggccggggatcacgatgttctggctgtccggagggaccaattacgcctggtcggccgccatctggctgggtttcctgtgcctgtaccgctccttatgggctggaacttcccggattagggacactcctttttcctggctctggataggcggcatggcttttgccgccggcatgacgaatgagaaccagattcccgcttccctgggcatgctgttcgtgtactggttttacgcccgctgccggggaatggttctcccttgctggtttttcattggctggggattccatgcgctgggaggggcctttcttctgctggctccgggcaatgcggcccgccttcattcggagacggcgggcggcgcagccgttctccattcctggggggagcgtttcagcgccattccggaattggtaaacgccttttatgaattcatgccgattcctaaaattttgctggccgttgccgctgccgctctgatcctgctgactgtggaagcggggataaacgcctggcgggggaaggccgggcggcgtatgtgcgtctccctgctgtttattctggtggctcatgccatggctatcagcttttttgtacgcgtgattccggcatggcacgccatgttttccgctacggtattgatgatgacgggaattctgggattgtacggggtatggatggatgccgtgcgaaggcggtggctcccattctgcgtgctgctggcggcggctggtccggccctgtgggtatgctccggatatctggatgcttttccccgtatccaccgccagtgcgaggaacggaaaatgttcatccgccatgaattggaacaaggcaagaaaaacattacggttcctccttatgattccgttcctttggccccttatgtttccgttatgtggcgcatgagcagcggggatccggatgaatttatcaatcgttccgtagcccggtatttggggattgaaagcatccgggtggctgttccggaaccgtgacggctttattctggccgtttcacaaatcctttccgttttttatttgaatgcgggcaaatgtccgcggaatcaacaatccggtgtcaatggcaaatcatgaaaacttaatcatgtattacgtttatttttttgggataaatcatcttccatcaatatggtaaaaatatataacatatttaatatgaataaaatatgttttcattaagacaacttggcattcatcggattgttgattcggtttacttcgttttgccatgaagaaatccttgttgtctttagctttaatctcaagtaccttgcttgccgtagaggcggcaacggtgcaaattgatttcggacgcagtgacgccacgacggacggtgtgctcaatatgaattatgatagtgcctccgccgctttgggcagcatgccgggaagcgtttctttggcatggagtacggcagaatggcctgtaggggataatggccataccaccaccaagacagttgaggaagaagccgattggaaaaatcctttcaacggcagcatgcctttcagtctgggggacacttttcgtgacggtcttttaacgcagacggccgacggggacggttctttcaccgtaacgttcagcggtcttgccgccggggagtattccttgtccatctttggaggtttcacaggcaaggatgcatttgccggtcaaacctggacgatcggaaacgccgatgcttccaatgccgtctggacaagcttcggtacagacgccaacggggactgggccgaaatttcttccgtgacgggcgataattccggagtccttactccggcgaacgcttccacttccagcgctactgccaataaagggctttatgctacggtagagaatgtcgtggtaggggaagacgggacgcttacccttacgattcagggggatgggagcaaggggtacggccttacagcccttaattacctttccctgacgcaggtgccagaacccgctacggcagcattgagcctgctgggcgctgctgccctgttcccgcgccgccgcagggactgaccggaaagaacaacctttgttatcaacgccgctccgtaattcacgcggagcggtttttttatttggcgtttttcctttccctgtctatgcagcaggtcgtttctatcccggcctgttggccggagcaatgcctgccccattccggagaagagccggaatgggaataaggcgcgggaaaaagcgggaaaacggagttgtccgggaagagggggttattgaatggggacggtttccttcaagcaggtggagacgatagtgcgcgtaatgcgctccagcggtattccggtgattctggatacgatgcgggcgtaagcgttcaattggtttgcatggcgctcgcgcagttgctcaggggtatcggcatgatccgtcttgaagtccacgatgacggcggctccgtcatcaagaatcagcctgtcaatgatgccggaaatccagttattcccatcaatggcttcaatacgctgttccttcatgatgcgcgccgtttccggaggcgtgaaaagttcgcggatggatgggatttccatacactccgctacgatgcgttccgcctccgtagcagggtggagagcccactccggcttgttttcatcatcccagcgggtaatccgttcaaacacggcgtggacggcggagccaagcgcggcggccttccctgcgcccgcgtgtttttctccccggagcggggaggcttcctccgacaggccggaaggggatatccgttctctggccaacggtttttgcttcggccatttcagcgcgctttccttcgcgcgtttgtgtatgatttccgggaattccgcgtaccacccttcaagaccgcgggagtacaggcatgacgctccggattccggaagtatgtcttccgttccccggttgaggaaccggatagaggaacggaccactttccacatggaatctgccgtctcttctcccttgtcttcccggtacgggaggataacgtaggtagcccgcttggcccgggtaagcgccacatacagcttgcagaatccgtcaaattgctgccgcgcgcgccattccccgtaaagttgccggaattgcgggatattcgtatagacgtgccgggagggggctaggacaatgccttccattctgtcctcctcattttttttgataaaatgggtcagatgccttccgtccgcaaaaggtgtgtccctgccgatctggggcaggatgacgatgtcaaatcccagccctttggatttgtggatggtcatgatgcggacaattcccgcggcgggatcttcccgccgggtcaggtcctccatgcgcctgatccattcatccagggaaacgccctgttcgtccacctgttccgcctcattctgccagacggccagtcggtcgcgatggaagtccgtcagttccgtccctccccggagcaggcgccgttccagttcctccatgacggcggcgtaaccgtcccgttccagcaggaagcgccattctttccactccatgctttccgggcatcccggcgtgatgaggggccggagaggggagtgggtgagcaggccgacgacaaaggggtctcccggcatcagcagccagcggaagaagtacagcaggtttttccccagcggagagtccacgcctaccggaacgtcgtcacacacttctgcggggatgccgtgatccgtcagccatcccttgatgacaagagcctggttcttcgtactgaccagtatcgctgtttccaggccgcggcgcagggctcctgtacgctccagaatatcagccgccgcctggcataccaggtcattggcagagacgttttccgtcttgggcgcctgccagatttgggaggcgccggggcggccttccagatggggggcgcaccggtgctccggatattccccccattgttccagggcggcgggttcgcacccgggcgctgtccgggcatagtcgcaaatatcgttgaccagatccagcacaggctggacggagcggtaggaagtggacatgccgcgttgttccagttgaagctgtgaagaaacggagcggaacagctccgggtctccgccgcgccattggtacacgctctgcttgatgtcccccactacgaaaatgctgccttcatttccggccttggattccgccagatcatccaggaaaggcttgattacgcgccattggggctgggacgtatcctggaattcatccagcatccaatggtcgtaacggcagtacatgcggtattgcagatcccgtttaagttccggcgtaatggtgccccctcccagcatgcgcgtaacgtcgtggaacaggaacctccccctgttgcggaccagggaggagtatttgccctcaaacaggagcatcagtccgtgcgtggcgcgtgtgcggcgcagcgtgtgcagggcttccatgcgcagccagctttggatgagtttttccagagcaggcgtccagaaatcccggaatttttcccgcgcctcttccacggtaatggtccagggggaacctccctctgtgcggaagcgaacgcggcccagcctggcgtattgggaaaatccgttcaggaagcgcaggaacagttctttgttttttacgccgtttttcccttccggcgcaggagtttgctgaacctggaaaaccagggaatgcagtacggagtcaaattgttccaggggaacgggaggcgccagctcctccagtgtgaagcccagtgtgacggggtttccccacatcccggcatccggcacatccagaaaaagttcgtgataggtgtccaggcggcgcatcatggaattctccgcgtccgcggcttccgcgtcagaatctgccccggaaaggaaagcgtcctcaaagtccttccttcgctccctgtttacggagcattcccggtacagggagagcagggcttcacggcgcgccagtttctccgccgtggggtcaatcatgctgaagccgctgactcccagttcaaaggcgctggcggaggcaatctgggcaaacaggctgtcaatggtgcagaggttgagccgcgccaaattctgcaccagaatgtgcagtaaatggaggaagcgttcccggtgcaggttttcctccttccatgcctccggagcgccgggccagaggccgggctccccatccgttcccttgatgaccgcccatagccgttctttcagccgcgccgcgcctgcttcgtccgcggcccctgcggccaggtctgtcagaatgcggtccttgaactctcccgccgctttgcgggtgaatgtaatggcgatgaggcgttcggggtggttgccgccgttcagcgccagcaatcccaggaaacgcagggagagctggtaggtttttcccgttccggcggaagcggagatcaacatgttggtcaggggcggcatcttagaaaggcaggtggggggtgaggcggaggcccaaaagatcctgcaggctttccctccgggaagtcatcaggtccttgaatacgtcataagagggcggtggccagcccagttcttccgcggtgatgagcccgcggccttcataaagaagcttcatcagttccaccgcccaggaacgggcgctgtccagcgcgcattcctcatatccgggcatggtgtcgtggagggtgtcccaggcggagattccgatatccatgggattggcgggaaggttgtaataggccgctgagggagcgccgccgtaggtttccgaggcccacagcacataaacgggaagctgcaggtctttccagcgcgcgtgcgccagcttcccgtttttccgtcgtttggtgtagggatgcagggccggggaaagcagggacagggcgtccggccgtccgagcggttccagatgctttttttcacaggaggaggccgctcccgttttgtagtcaatgacccgtatgcgcccgtccgcatggcggtcaatgcggtcaatgcggaatttcatggggaatccgcccagtatccagttttctacctggtgctcaaaggcaatgcaggaccatccttcctgaagggcctgcaaatgctgaacggcgtaaacggaaagcctctgttccatggagcgtttttgcagcagcaggggcatgaggggggaggggccgtattgtttccggaaggtttgttccagtatttccgtgatgacggcctgaagggaagctgcgttcatgccgtctttcaggacggcgtgttcccggcagaagcattccagcacgtcgtgcagcatggtgcccagttcattggcggccatatcctctttgtccggcaggaattcttcctcattcatgtgcagagcctcctgcgtccagaaacgcatggggcaggacaggaaccttttgaggacggagggggagaagggcttccctctttccttccacgggtttttgtagccgggcgccatcgcgccgatgtccgcagcggtcttccagccttccgcgggttgaagatgccagttcccgcgctggtagggcaagggcgcgggcgcatcgctgatttcctggaaaagcagttctacgcggcgcggcagctccgcctccgggcagcgcatgagcagggaggatggggtcagaggatcattcctgctgctggtccgggagagaaggatggtgaggctgccttcccgttcgcgggaatggagcagggcggtcagcagaaaactgtcccgggctttcttccggttaaaggaatcaatgcccagggtttcccgcagttcctccggcatgaactggtcggaaacgcctccttccggtacggtcccttcgtttagtcccgttagaatgaggtctttttccgggcggaagtgaacttccatccagcccagggaatccagcgccgcatgagcttttctcctgtttctgacgcgcagcggctggaggcatttcatcaggagcagaagagccgcctctgggctggaaaacgcggtggagcgctgttgcagacgcatgagtccggaaaggcaggaatggaacatttccatggcttccgtctccgggccatagatggttgccagggccgggacccattccatcagccgttcccccagcattcccggttccgccatccggttccgccattccagaatggcctggatggaaggaaaggcttcgggataagcctctttcagcctggaaagcaggtattcttccgtttccggaaggtatttctgctggattttgtccagcgcggcgcagcaactctgctgattccttatccctagggaggcgcagagcagggaggagcgcgccagggaatagacggggcgcgccgtccctttttcctccagcgcccgctggagattgcggagcaggtccatgacgccgcttccggcaaaaggcttcccttccggattgtggaggccccagccgtattggcgcagggctgcgtccagggcgacgttcatgtcaggatcgcaaacgcccagggcgatgtccggcgtttctccttccgctgtgcgggcgatgatgcggcacgtttcttcagccagccgtgccggattggccgcaattttgatttggtcgtcgcggattttgatggggcgccgggaccactcttccggcagagggcatccccaggaatcaaaggaggcggcttcttcctccggcgcgtggatccatatctggacgggtacgccattgctttccgcatgccggagggcatggcgcagaggggccggaacctccgctgcgcaggccagaataatatttccacctgtttccctcagggagttcagtagccggggcggggcttccgccttcatggaggttctgttttcaagcttccagctttccagttgttgcgtgcattgttcttccagcctttccatgtccgtccagcgttcgtctctgcctgcacaggcatggtgggccatgatgcaggaaatgccctggttcgccatggcgtgcctcaggttttgcaggctgccggccatttccagcatgctggaaaaatcctccggcatggcgcgtggaaacaggcgggggtaaaggcggtggggagagtcccccagagccaggagccacccggccagttcttccggagcggacgccgtttcttccttttcttccatccggaggaactggtctgccggaatgacctggggagcaaagattgcctgtgtacgggaaatggatgcaagatattccctcagctgtctcccggattcccgtgtgggaaccagcaccagatgccggtggaagtcattttccagggaaagcaggcgttccgccacagcccggcaggctggtttgtcccaggatagaaagaatcggttcatggcagggaagcaggatcccccggcaagggggaaagcggaagattacctgggaatgctacatcaggatggcgggatttcccatctattttttcatgattaacggggcggctcatggcgtgccgtgaggtgagccggcattggaccgcatgttgacggcgaagagaggaattgttttgcctttccggcagggcgtggcggcggaaattcggaagaatggcatgtttattgttcctggacggcccgtttccccctggttccggtgaccagaagcacacctgtgaagaccagcaggacggagaggactttcatccatccgaagtggtccatgccccacatcaccgccacggatgaggcgatcaccggctggcagtaattgtacatgctgacggcggtgggtttcagcctctgctgggcaaaagacaggcagatatagctgacaaaggtagccagagccaccacgtaggcaatgcccagccatgtttgcgcgggcagggcggaataatggatggaacccacttcccggaaagtgaaggggaggcaggcggctgcggcatacgtaaacatccatttcagcagggtgacgggagagtatctgccaatcaggttcttaaagaagacaaagtaaacggctacgctgcactgggaagccaggcagagaatgtcccccagcaggttgttgtctcccgggagggccgccgcacgccctccgctgccggaaaccagcagaatggctccgatggcgctggcgcagaccccgatgatttttttccccgtgaccatttcccggaggacgaacgccgccagaatcatggtcaataccggtgtaatggtggtgatgatggccgcatccgccggggaagtgaaccctacgcccaccgtgaaggccatctggttgaagatgattccgaacagggaggcgtaaaacagaggcagccgatgcttcctctttatgggttcccctggcacgaaagcggaggccagccagaacaggatggccgctcccagcaggcgcaatgtggcgagagaagcggaacttacttctccctgctgcatgaccagtttactgacgggagacatgaggccccagatgacggccgccgctcccatcgcgatatgtcctttcagcgtttctgacggcatggtgcggcccgctgcgcggcgggtcgcacattctccgcttccgcaagcggattgcaagagtttttcgtgcgggcagggacgcggaatacagggaaaacatgatgatgcggaacgtccggaaggactcgttattctggcgcctcttgtcccatcgttttaggcttttctccggaatggaaaacaatgccttcatgttgtttccggcattaaagttcatttttattccttcctccagccatgcggaggattggaggggagaggtacagaagtaacttccccctgggattatatctacctttttccggatacgtgttgatcatggcatctttgccccgtgctactgcggatggtcattattctgtgcagcagacatggaaatgccgattttgtgttcccggctgttgccgcggagttccggggcgtacatggcctcaatgacggccggaagggcgctgaagcgtcccggacgttccgcgcgcaggcggtggctgatctggtactggcccatgggcagggaggaaaggaagaggcgtatttcctcatcccctatttccctgtagccggaaacggttcccagccgggcgtagccgctggcggtttcccgggattcgcagcctgcgggcttggggtccaggagcatgaggtattccacgtcgttcttcgttttcacggtcatcaccacttcaatgatgtcgccgctggcaatgacgtccccgtttttcaacagcgtgcgccgtgtcaggtctctgccctgggagacgagctcccctgcatccgtctgggtgtccttcacggaaccgtctttcaccgtttccttccggatgcggtagtaggagcgttccacggtgacggcattccccgcggcgggaatgggatcttccagggagaagtagctgagggtggcattggcataaatgttccctctgccctttttcctgcggatggtgatgacatggttgccgtccgtcaggtctttcccgctcatgcggaaggcgttgtcaaaggtgaacagggtttctttcgtactggcgattgttttaactggaacgccgtcgtacaggatttccgcttccatgtcctccatgccttccctggtctggagaaggtaggcggacaaggcttccagacaatccgccgtatctttggtggagtcccagtaggaaccgttggcgcggttgtcgagcagccattttgccaggcgcgccgtgacgggattgccggggtcgctcttggccatcagtttcaggtaggccgcctgcgtggccgcgccgctgccgtaccaccgccaccagtagccttcattgggaaggcgcagccaggcggtttgcagggagtcgtcctgctggaggaactgggaaatgatgggcattaccttcttgaagtcgtccatgcggtgggcgtccagcaggatttccgccagttgaatctggctgatgacgggaagttccagcctgtcgcggaacaggtagcgttccatgggaaggtttttgacgccgcattccgccaggacggagtaaaccagggcgtccgtcgcggaggccgtcaggcggtaatcccccagcttgcggatggcttccttctttttcggtccgtccggcagttgttccagtttccggtattcgtctcctttttcaagaagagctgtctggcgttcctgatagtttttcagccagcggacggctttggaaagcatcccctccgggacattgaccgtgtttgaagcaatcttcaggccgtgagccacatgggccgtcatgacgggatctccctcttccgcccctccgaaccatccccaggagccgttggagagctgtttttcccggagggaggagattcccctggcagccatctttttcagcgcggcttcatcataaacggggttgcgttccagttttttcatgacgctgtcatggaaggccttgttcctgatgtcccggggattcaggctgcgatggcttttcagcgccgctccgagattcaggccgagttgcttgagcgtgtccgtcacgacgagggcggggaggaagcggttgagcgtctgttccacgcagccataggggtattccgccagatagggcagtgcctccaccatgctgagggcgatgctgggggagaccttgacgaccagttcgctttcctccctgcgccgctgctgcggcagggaaatggaaagtgtcttttcctgttctccggagagcactgcggcgctttccgcatggagctgcttcatgccgtgcaccagtacggggaagttcatctgcatggcgtctccggtagagccagccgatgcttccatggcgacggcggcggttccctccctgacggcggcagcccaccagttgacgactacctgcccctgggcaggaacgtccacttcccgcacggcggaattatccgtatctgcggaaagccccttcacggccggatcgtcagccgggagaagttccaggcacccgtctttcagggaaatggaaacgcgggcgcggacagcctttcccgtccggttgcggaccagggcgctgagcatcacgatgtctttttccacaaagaagcgcggggcctgcatgctgaccatgaagtccttcgtggtcaggaattctgcggaagcctgcccaacctgcaatccgggggtgatgacccaggctgaggccttccatgtggtcaggttgtccggcatttccacgggtacggcaacgtttccttcgtcatccgttttgagcgtgccgcaccacttgatgtagtccgcaaaattggtgcgcagttgaatgtgcggggaaccgttttcctgcgcgtccgcatttccctgtccgtttgcaagggactcgctttctgcactttctttgtccgcggccatggccatgaccggaacggcggcgggggcggccgctcctgtagccaatgcgcggcttgcggcagcatcagcaccggaatcgaacactgcctccgcaaagccgttaacggtccctttggcctttctcgccataggtccgtaatttctgtagagcagggattggaaagagggctggcccggaccgcgatcctgctgcgtgccggaagccgtcatttttttcaggctgaggaagccggtttcgttcagtctgccccatacggttttggagatgtccgtaatattggggcgtgcgatgtattccagagccttgtcataaacggccagggcgacgatgccgttactgacgggtttgccgtcaggccccttgacctgaatggtgacgttgccttgttcaccgggccggtattgggatttgcccggcactacggaaggagccagaagctgtccggcgggcggaatcagaagttcggcggaagcctcatgaagttctccgtttctgacggtgaaggcgttgactcccatattgggcatatcttcccgggtcaggcggcattccacaagggctgtctgccggtccagggaaaccagacggcgggattcgtttttccaggagttgcgcaggaaggtccagacgtgggcgtccggataatcagaggtgacgagcagcctggccgtatctcccggagcgtattcctttttgtccggatggatggaaagaggattgattttaaaaggattctgtttgcccttgccgtaggaaaggaactggaaggattcttccaccttgttgccgtgcccgtcctccagggttgtggaaagggaatacaggccggattccccggtctggaaggacagggaggcttccccatctttcccggtggcgatatcccaggtttccagcgtttcccgtctgccgtccgcacggatatgctgcaggacacaggttcccctggcatgggcaattttggcgccatccgccgtggctgcggtaatggatgcttggaccggcgttccggcgggggcatagccgcggttcagggtgatgaagatattaaacggacggaaagtggcaatgacttgtccggaagcggaaacttcccgcagggaggcgtccgtcacgctgacggaaacgcggtaggtgacgttgctggaggggaaatcccgggcatcctgcgccgtgggtaattctacggatgcttttccgtccttgtccagcggcaccgtcttttccaggacggtcagaggtgcatccaggaaaaagggaatgtagtacgggctgaaagacctgtcgtacagccagctccatttccagtaaggcgtccagatgttcgcccccagcgtccgggtgatggtgatggttgcctttcccccgcttacggggccgcccgcgtaataatccgcctgaatggcgacgggaatgggttgtcccagccggataggtttggcgggggcatccattctgacggagacttccggctttttatactcttccatccggaaaaggggggcatacagccggaaatccggatctgcggagtcatgcagtttcagcttggccccatactggcccagcggggcgtccgcgggaatgagcagctccagttcaaagctgcctgtggaatccgtcgtgacggtctttggagggaaaatgctctcatcccctgttggagaggcaatggtcagcgtcagtttttttccggcgcagtcttttgtcccgggattcgcgatgtccgggcggaagaggacgcctttgaaacgggccgtctgtccggggcggtacacgggctggctttccaggaaaaagcaggaataggagtcggaggccttgttggccgtatccatgaggtaattgccggattcccagccgtagtcagatattcccgccagcacataactgtcccccttggaagcgatgcccaggaacatgttgtagggaggggcgctggaatggcggtgagggattgtttctgtcatggctccgtccttgtccgtgattccctttacctggcgtttttggagcgttttatcctgccggtagcggaggagccgcaggttgactccttccacgggcattcccgttctggcgtccgccaggaaccagagattgccttccggaacggaacggcgtaccagaaccatgtctgacagagtgagaaagcgatggaaccggtagccgttttccagtgtgacggtgagcaggtaccagccgggtttgcgggtgggtacgggaatgtgagcgatgtggttcaggtgccggttcccgggagtcagggttatctcatcccccttgatttcctctcccagatagcgggcataggatgagtcatgcaacaggctgaagagcaggttccccaggttggaatacctgtctttgtaagcttttcccagcgttttggaggtttggatcttatccatgcgttcttcctgccaccgtttcatatccacggggcggaccgctacgcaggcccgggaagcgttgcggtaggagaaggaaacagtcaccggttcccccgccagcagcgttcttttatccgtatcaaatgttccgttgggttccgtgatggaggcgatgcgtttcttcagattgtccgccacgtccagaaattcctccttgtcctttttgttccaggattgtgcgttcctggtttgaaggatttttcctaaaaactgcgcggcagcgggtctttggttgcgggccaggaattcgtccgctgccagattggcggcgttaacgtagtaatccggctccggcgttattcggacggcggaagcaatccggatgaaatcataatccgggggaaggttggtgagcaggaatttaccgttgcccgtccggtcggttttaacgatggtctggtccgtttttaattccgccgggttgatgcccgccaccatgcccgcgttgccggggccgtacacgaattcttggtccggcgccgtattggcataagagaacagccggcggcaccaggaggcggtgaaataattgatctggttggccagttccggattcacctgaatggcggcgtccagcagccagcgcatgcgttccccgtcgtttttagctgtttcccaggaggaagaggcatggtaaaagataacttccggctttcctgtttcggcattgaccatgacgggaacggtggcgacgtttcgaaaaggggatgcttcctctctggagacgtaatccggcaattccttcaggttggtcaggttccccagggctgcgtaagactggaaggcggaaaggggagcgtagcggtttcctttgaccggcaacgcctgtgccgtgatgaagcgcagttgtcccagaagtttcatgttgttgcccttctccgcaagctgcatggctttgacaaggcaccgcagggcttccacacggtcccttgcttctccggaatattctccatcccatggcccggcgccgcggatataggcgccgtccaccagtttgaacgtatggcaggcactctggtacaggagtgcggcgtccctcaggaaatggggattggcgccgtggagcttcatctgttcctgcagaatggaatccagattgatggaatcatccagggcattgagacgggtaagagcctggtagtaaagaagcagatctgtcccgctgtattggtcgtcatattcatggagttgtttcagggcctgttccgccgctttcttgaacagccttttgcccagaagcttttcaaggttttcaacagcttgcttcctttgctgcggggaaacaggggaatttttaccctccgcaagggcatgttgttgcggaggggtggatgcgtccgccggggacggcattccggaggccagcaatcctgccgccagaaaaagagcggagaagaatctgttcattccgccagactacttccaagtaaaatctttggcaagttgcaagtaggctgcgggaaaagggagattgtcttaacgctgtcaacaaggccgggagtgagggaaggggtattccatgatcagacgtttttcccctttcgtcatgcgtgctgcagattactgcaacccagtcggtagatggcctggatgtcccggacatccagcttttccagtccgccgacggggccgcgcacactgacggcctgttccgccatcagggggaaatccccgggaaggatgttcagttcttccatagtcgtcggaagccctaattcccggtaaaaacgttccagacgggaaataccttcccggatgatggctgacggttcccggaaggaaccttccactcccatcacattgacggcgaactgcacgaatatttcctggtgtttgggggaaacatacttcatccaggccggggtgacgacggccaggcctgctccgtggtccacatggtacagtgcgctcaattcgtgttccatggcgtggcagccccagtcctgttcgcggcctacccccaacaggttgttgtgggcgatgttgccggaaaacgcgatttccgcccaggcgttgtaatcattcaggttcccgttcaggatgcgggcgtttttcatgatggtgcgcagggtggcctcacaaaggctgtcggaaaggtccgtatgcagggttttggtgaaatagcgctcaaaaatgtggctcatcatgtcgctgacgccgttggccatctggcggtgcgggagcgtaaagaacaattccgggttgataatgctgaatacggggcgcagtttgggggaaccgtaccccagttttcttctggtctcttcattggtgatgaccgtattcgggctgctctcgctgcccgcggctggaatggtcagcacggttgcgacgggcagagggtcggactgaggctgttttttggaaaggtatagttcccatacgtccccttcatggggaacgcccagcgcaatcgctttggcagagtcaatcacgctgcctcctcccacggccagcacgaggcccaggccgtgttcccggcagaggcggatgccttcatacaccaggggcagcgtagggtttgcctggacgcctcccagttcctcatactccacgccggcggcttttaaggatgccgtgacggcatcgtaaagaccggaacgtctgatgctgccgctaccgtaatgaagcaggatttttttgcctaacggcttgagaagggttcccgtttcatggtgggtaccttttccgaaaataagagtggttttgttatcgtaaacgaagttgagcatggcgggaatgatacggcaacgctacggtccttccgtccccttctcaagatttttgtatggcctgttcccctttccaggggggatgctgttccggaggatattctctcatgcaggggttctgttcttctctgttttttcatcattggctcatctggacggagctttctggaggattgttttctttccgttgttttttggcgataagattcagcggaaatgactctctgcgggagtggcggcgccttccggccccgaggggccagcggaagacggttatttcattattctgggccgcttccggcaggtaatcggaacaatggccgtattcggccagggatgcgcggagaaaggaggggaaacgggaagtttcagaaatccgtaaaaattatcctggtgaatactgttcaaaatcacgatgcatggcatactcctcctgctttttgcttgagcgcggaggccttcccgtttattgtcatgcacgggccatgtccggtccccgtagttcaatggatagaacgggtctctcctaaagactagatgcaggttcgattcctgccggggacgccacccaatattattcagggccttgcatcagcattaaaaacgcagggattttgcctctcttgtgcgaggtatcgtcataattgattgaatggggaatgattcaagggaaaagcaggtatccggattatcggtgtccggccggagaaggcgaataacttgggattcatgtccgattggaaacaaaaagcaaatgcggaagaaagattgcagatagcaaggaaatgtgctaaaggctgccggagaagagcctttggggcggaacattgtgcttcgggacatgaacaggcaggcatggagcaatgtttcccagccgtacaggggatggatgaaagagcgttatgcaataacaaggacaagaagatggaggcaattaaaataatccgttatctgtcgcccgttggagaaatgatgattggctcatatggcggcaatctttgcatttgcgactgggcaaaggaaaaacgccgcggcacgatagaccgccgcatttgccggcatctcaacgctgaatatgaagaaggaacttccgaggttattgaacaggcggtaagccagctccgtgaatatttccagggggaacgcagagactttgatatacccattgtatttaccggatcggaatttcaaaactcagtctggcatgaactgatgaaagttccttacggttccaccatttcttatgcagagctggcgcgccgcattcatcatccgagggctgtccgggctgtagcgtccgctaatgccaccaaccccatctccattttcgtgccctgccaccgcgttattggcagcaatcagaaactgacaggttatggcggggggcttgatgcgaaacgggaattgcttgccctggaggcgcgggtaagcggaagtgtgctggccttatgacccgtgatgtgaggaagacaggcaaggacgtgtcaggtaaggctgttttgggaggctgctcttccggggcagcccggcagggggggcgttaagaagcttccgcggttgcggctgaatttccggctgtcttcgtttgaatggaggtgccttgtgaggcacttcaccatttgaggagggtatttcctccctgggcgaatccggagagcagggtgcccattgctgaggttttctgggctctcgcattggagcggcccatgtattgctccgtgttggcgcggttgtacagggattgggcgttcctcatggcttccgccgcttcatcctgaatcctggtttgcagacgcgtcgccaaagcctgttccctgattggaacggagccttcccggagcagggaggattgggcggcgtccagtcgggcttctcccatttggcgcgcagcgtcctgctgcatgcgtttggcattttccatccctgtctgtttttggaggtctacctcgttcctgagggtggcggcatttgcgtccgccgcctgtctggtggcttccgcgctttttttctgtgcagacgcggatgccgcacctgctgccgctgaagtagcggccagtgttatcattcccaatgatgctggatcaaatcccatgcgcgcattctgatatgaaaaacggttcaggcgcaaaacgcctgaaccgtttgacatgaatcagggtttggcacagaaggggttactcaatcacgatgctttcaatgttcagcaccggatgttctggagtggagtggggatcaatggttccggtaatgatgacggcgtcttgttctttcagcccgttcacacctttggcggagtgcttgatgggctgcccctgttcatccacgaactggacggtcatcgtgttatttttccgtatttccaccggtaccgtaccggcggcccagactcccttctccttcatattgaccaggagctgagccgggtctccgatggtgaaggaagcaatgttttttgaaaagacggggtcatctccgattaccgctcccttgacggtgactttgtcgcccggagccgcttttctggcatctgaaacgaccagagcgcgtggcaggccaaccatattttccgcgaatcttacggccatcttctgggtaacgttctggtcggaagtgagggcgtttacagtttccttgggattgcagcccatcagggaaactgcggccattgtcagaatgatcaagtgtgtggtgcgcatggaaactcctttctgttgaaaggttggattccttttccccttctgccgttcatcattccgtgtaaggaaaagaatattttttacaggaacagcccggcagccagcatggcgagatccctgagaacgtcccacaatttttccgcattgtggatgcaatccgccagaaagcggtgaaggcttacggcattgaacaggcgcagaagcgccaggaagagaagaagattggcaaaatatacgagaatcagggagaagaaggtgccgttgtccgccaggtccggctggtctttgggaatgatccatgccgtccagaacaggtggaagcaccaccagaagcccaggccggagtaaagaagggcctggcaggtgactgtaggccagaagaggtacgttacgccccataccaatccccacagcatggcccagagaggaaagaagtagggggaaagggagataaagatgttgtttttatccgtctggatgtaacctccgtccagatccgctttgaaagcatggatggagccgcggctgcaaatgaccgccagagcgtgcgtcagttcatgccccaatacgtacaggtacagcagggaggatgtgaacagcctgctgctgcccagcaccacccacacggcagcgcccatcagggcgtaccatacgggaatggagaagaggatattgaggctgccggaggcatgggccagctggtcgcacagggacatggccgtgatcagggccagcggaagcaagataagggtggctacggcatgcctgatgaaccgggttctgcgcgggagatccatgaaggaaaattcctggcattcgtcctcccagtattcggaggatacctgggcgcggtaagttttgtcccaggcgtcccggttgcattgccgcatcatgtcgccgaggcttgccgcggatcttggtttccgggcggtttctgcataccggcgccagtcctggtgcggcggtgtgtgtctgggggccttgggcatgcggtgtgaggtctggaaccagcataaagggacttgaggagaaatgcgaaccaaatttgcctcttccggaaaccggaggaaaaaatgttttatccacgccggctgttcctgtataatccgccgcatgcaagatgtcctgctggttctggaaacttcctgtgtgcagtcttccgttgcggcttggagcggggaaagtctgctgtgccaggcggcatggagagcggagcgcaaccattcctccgctattttcaaggcggtgcggcaggttctggatgctttggaagggcggcgtttgaaggaaatcgtggtaggttccggtccgggcgcttacggcggaatccgcgtagcgctggccgtggcggacggactttccctggtgcacggttcccgcgtggcggctttttcctcctggaacggacttggtctgcatcatggtgaggcctgcgtaatgtcagatgcccggcgtggcggctggacgtgggggaggctggaaaacggcgttctgacggatgtgccggcagtgcttcctgcggagcaggcccgcgccagcgtggcggagtgcatgggaaaaggcgtgcccgttttttccacggaaacggcggatcatctggccgcccgggaaatgtcggggattgtccccgtgtatccttctgcagaggcgctcggggccgtgtggctgtccctggcggaggcccgcagagaagaacttctggaaagtccggcggaaccgctgtatgtgagggctccgcacatcacccgcgccaaacgtcccgcatgggccgtgaaggcgtaattaaggtttgactttttggaagattgttagacttttaaccggtaatattcaccaccagtagcattttttaacatgagcaatgacactttttccgagcgcctcgcatatcccaaaggtttaaaaggaatcatcgccaatgaatccgctttgagtgacgtgcgcggcgaggaagggcgtctgttgtatctgggctacgatatcgatgatctggtggagatgtgctgttttgaagaagtggtttatctgcttctcaacaagcgtcttcccaaccgtgaggaattggagggcatcaagaaacgcctccgttccgaccgcgacctgccccagcccattctggatttcttcaaaacggccaccaagtccgcccggcccatgtccgccctccggacggctgtttccatgctcggcatgtatgacgaccggacgaaggatgccgggcagttgaaggaaataggcctcagcctcatagccaaggttcccgtgatggtggcgtattactaccgtttgtgccagggtctggagcttccccccgttcgggaggacctgagcgaggcggaacatttcctgtggttgctgaagggtgaggaaccggatcagtatgaagcccatattctggaggtagcctacattctgcacgcagaccacggcatgaatgcctccacctttgcggcgcgcgtctgcatcgccacgctttcggacatgtattccgccatcaccgcggccatcggcacgctgaaggggccgcttcatgggggcgccaatgagggcgtgattgaaatgctcaaggaaataggcacggaggaccgggtggactcctacattgaggacaagctggcgcggaaggaaaaaatcatgggcatgggccaccgcgtgtaccgcgtgctggatccccgcgccccgcatttgcgacgcatggccatccgcctttcctcccgaatcggggaacccaagtggatccgcatgtcggaacgcatcgcgaaacttgtccgggagcgcaagggcttgaacgccaatgtggatttttattccgccacggtttattacagcatcgggatccccaccaggctgtttaccgccattttctccattgcccgctgtagcggctgggtggcccaggttctggaacaaatggaggataatacgctgtacaggccgttgactctttacacaggacccaaggaccgcattccggttcctacgatcgacatgcggtgacaggttttaatcaggaaaggcgccggaagcaatatccggcgcctttcctgcatctgccttccgcttttctttttcgtgaaaatatcctttctatccgccggcggtattcaaccgtactgttcattgtcctgggctttttccattatagccgtagcggaagctcaagaaattattgaatagcaatatgccgttatcgcgggtggggatgaagcagatgatttttttcagttccctgggagactatacgggattcccataagggtatgttctgggatatctgcggagccgtctcttccttgattctcttttatctggtatgtccctgacagaggaaagacgcggaacccgcctcttcatggccctgtgttctttggtggtggaacccgcagaacatccatgccgatgtggagaggcaggcggggggccgtcaaatgccggtctggcgcagtccttcataaaggacgacagctacggctgtggatagattcaggctgcgggctccttctccgggcatcggaatagtcagggcggtatctgcgtgttctctcagcatgctttccggcaatccgcgggattccggtccaaaaaccagatagtcccctgcgtggaaaaccgcatcccaatgggaacgtggcgccttggtgctcaggtaccagaactgcgcgccgggggctgccgcctgcttcaattcctccaggctgtcccagacatgcaggtccaccttggcccaatagtccagacccgtacggcgcacatgcttttcatccagactgaaccccaaaggtttgatcaaatggagcctggagcccgttgccagcgccaaccgtccggcagctcctgtattatgcggaatttccggatggaacatgacgatgtggaaacggggctgcatgcgcttattctcatcacaaacaggcctcccgttcaagtgggacttgtccaaaagtggcaaataatgtacgttttcacccgatgagagacatcgtatattttgatttggaaacccgtcattccgcggcggaggtgggcggctggcataatacggccgagatgcgcctttccgtgggcgtgacttattccacggcttccggcaaatatacgatttattctgaggaaatggtggatgatctcatccggcagctttcccaggccgacctggtggtgggttacaaccacgagcatttcgactatggcgtgctccagcgttatacgatgtggaatatgattgatatcacgaacaaccttgatttgtgcaaggacatcgaacagcgtgggggagtgcgcgtcaagctggattccgtggcggccgcctccatcggttcttcaaaaacggccgtgggcacccaggctctcaaatggtgggcggaatatgcgcagacgggtaatacggagcttttaatggatatagcccgttattgctgttttgacgtgaaggtgacgcgggatgtgcactggtacggggcggaacacggtttcatccgttatgatgataaaaagggcggccaggtggaattgcccgtggattggaaattgtaacttttcctgcatgcatgcccggccagctgtagccggtttttttccgggcgctgaagtgggtctggtttcccgcctttggcggcgttgccgtttatccccggacagatgccggttatcagggaatggctggggcggagaaaggcttccgggaggaagcggacggcaaccatgctgttgccgcctggcttaacggcggttgatgcgggccacttcccgctgggcttcgcgcatttccacgcgggctttcaaatcgtagcgctggtcgcggtgggttttgcccttgcccaggcctagagccagtttcaccttgccgtttttccaatacagcttgagagctaccagggagcagcctttctgggaggtctgctgttccagtttgaaaatttcccgtttatggagaagaaggcggcggggccggcgcgcctggtgctggaagaattctcccgctgtctcccagggctggatgtcgcagccgtacaggagcatctggccgttttccaccctggcgaaggaatcggcaatattcaccttgccggcgcggatggatttgacttccgttcccttgagttccatgccgcattcgtaggtgtccagaatttcgtaatcccggcgggcttttttgttggtggagatgtcggagctcatggcacgaagggtagaaggatgaaaaggccccgggctgggagaccggggcttggccggatagcgaggattccgtacggaattccggtccggaacggcaataaagggaatgtattattactggttgtcttcctggaggctgccggattccgtatgatagacgagcttgccttcaatgatttccgtcagggcaatgttcgcgttgcccatatggggcgtggtaggcaccagcggggcgcggccattattaagctgggctacgcggcgggaaaccacgttgatcagcatttggggctcgggaatgattttggaggcttgttcgacgagttcggctttcatgtaaaaaggtctaggtagatatcctgatgcgaagagagatataaaaacggttcctgctcggaatcaagcctatattacggcatgagctgccttcgctcgcgggaatccagttctttccatgcgccgggtttcagtcccgccagggagaaatttccgattctggcacgaagaagccggagcgtgggaaagccgatggcggcggtcatgcgccgcacctggcggtttttcccttccaccagcgtcaattccagccatgaggtgggaatggaggcgcggtagcggacgggagggatgcggggcggcacgtcaggctccctgcgcatgaggcgtgcccggcaaggcagcgtgcagtacccgcggatgcggaggcccccgagttccagagggcgaaggtccgtttcggaaggagtgccttccacctggctccaataggttctgggatgcctgccggaggggttcaggagacggtccgccaggcccttctcatcggataaaagaagcagcccttccgaatccgcatccagccttcctacaggatacacgccgggaggaaaaccgaattcagccagtgtccggtggtggggagcctccttcgtaaattgggagagaatgccgtaaggtttattgaacgccagaatcatgccgtgcacggcaagggtagcatgaaccgccggctttggcacgggaaattgaagcggcttgacttgtctgcgttgggaaaggaaagtatctgcatgcatggaaaaacggcaggttgcgtcctgatgcttgcgtgttgcgtgcccgtctgggttcaggcggcgccggatgcgggggaagtgaaggcaaaaattgcgcggaaaatctggcaaaacgaatgtgccgggacaataagggggctggtttcctggaaccggggagaagcgtttccttccctgggcatcggacatttcatctggtttcctgccggagtcacggaaaggtttgaggaaagtttccctgctttcattcagttctgccgcaggaggggaatccgggttccggaatggttttccggtgcggctccgtggcggaccagaaaggaatttgaagcggcggacgttcgcggcggtcttcctgaacggatgcgccggtggttgtccagtccggcggccctgcaaatgcaggcggatttcattattgccaggtctgtggccgctctggagcgtatcaagggccagtcccgccgcccggaagagatggcggcccgctattacgccgtggcgtcggttcccaacggcatgtatgccctgattgactacgtgaatttcaagggagaaggaaccaatccggcggaacattaccgggggataggctgggggctcaggcaggtgctggaggaaatgcgctccgtttctcccggacagcctgcggcggttgaatttgcggaagcggccaaaagggtgcttcagcgccgcgtggacaacagtccgccgggccgcggagaagcgcgctggcttgccggatggcggaaccggtgcgattcctataagaggaatttgtgacgaagtcctttcccaacagaaaagaccagttgtgcaattatccttgacctgacggggattagggtgtaattccctcactccatcctgaaacttcgctgattttatgccaaacactcaagaagaaacaacgctgattttgctgaagcccgactgtgtgcgaaaaaacctttccggcaccattttgaaacgttttttgtccgaagggtttcgcctgcgcggcataaagatgatccagcttgatgaaccggtgctccgggaacattacgcccatattctggacctggtcatcaatggggaaccgcttttcccgaagctgcttgatttcatgaccagttctccggtcattgccattgccctgaaagggcccggcgttattgtgcgcgtgcgcgaactgctggggcccaccaattcccagaaggcagagaaaggcacaatccgcggtgatttcggaacagacagcatgatgaacatctgccatgcgtccgacagccgtgaatccgccgccgtggagctggcaagatttttccgggaagaagaactgtttgacggccttaattaagggaaggccgcctttttcccatcaggttaattgagggccgcagctgtaataacggctgtggcccttgccgttgcgaggctgtacctcccatgggaggatgaaggggggaggcagcggcttttccgggagaagcaggaaagaacgggttacttttcccagggagtggtaagataaaggaaggcctttttcatacggtaggcctcacgcatgaagccgtccatgatattgttgcagctgtgtttggaaaaggaatggccgtaaatgcgcttgatggcggcatcctctccgtgctgcttctggcgctttaactcagcgtccatgtcccggcgttcgatattgggggcgctcagattgtcaccatgccagcgaaaatccgccagcagcctgttgtaattcacgaacttcttccccgcccggcccaggcgcgcgtaatattccccgtccatgtcgtagtggaaacgttcgtccagcaggaatccctcttcaatagtagtgcttcggcgcaggaacaatgcggtggaagccagataggtgccgtaccagatgtgcatgttcagactgtagggcagggccttcatggcgcgttggatctctccatccggcccgatgaaattccatgctccatacacaatgtccgcatccgggcgggaatccgcaaaggccttgaccgccgccagagcccccggcaacagccggtcgtccgtattcagccacataacccatttcccgcgcgccttgcggaagccgcggttaatgccttccgacatgccggaatccttctccacatgcagtttcaggtgagggtaggagtgcaggatatccagggtgccgtccgtggacccagcgtcctggataatgtgttcaaatgtaaccccttcctggtttttgacgctctctatgcattcctttacgtagcgggcgtaattatagctgggcgtaataatgctgaaatccggttctgtgtccataggcaaggttagttgaaaggcttgatggaacgttccctggcgatgtaaatagggcgctttttaacttccgtataggttttggccagatattggcccagaatgcccaggcacagcagcacgatgccgcccatcatgcagaagacgcataccagggaagtccatccgtaagcggaatggggccagatcaattcgcggaccgtcaagataatgatggaaaggaatgagatgaaggaaagaagtacccccatgatggaggccagcgccaggggggcggtggaaaaggccacgataccttcaatggagtacaggaacagcttgaagaaagaccacttggtttctcctgccacccgttccacattttcatattcaaaccatttggtccggaaccccacccattcgtacagccccttggaaaatcggttgtactccttcagggaaagcagggcttccagtacgggacgggtcatcagcttgtagtcccgggctccgtccacgatgcgggtgtccgatatttgatgaatcgtcttataaaaggcgcgggcgaaaaaggaccgcagcagcggttccccctgccgggtgacgcggcgcgtccccgcacagtcatatccttccttctcaatggctttcagcatatccgggagcagggaaggaggatcctgaaggtccacatccatgacggcaacataatcccctgtggccgcttccaggcccgcatagatggcggcttccttcccgaaattgcgggagaaggaaatgaattttacttcaggggagtgttccgccattttcttaatcatttccagggagcggtccgtggaaccgtcgtccacgaagataagttccggggcgtagccctccaggcattccttgaagacccggtctatttcttgcttaaacgccggaatggcttcttcttcattcaggcagggaacgatcagggaaatgcgtttcatgtcagtgcccgaatcatacttcagaagccgtgcggatgccagaaaatagtccctccatgcacaaagccttcctccactggaaggggaggaaggctgccggaaaagaagccgtgcgcggaaaaataccggtaaggtcagaacttcggcaggttgccgatgtcatcttcgttttcaggggcgtgcggatctttcaaatcactgtccccgtcttttccgaaagaccagaaatcataatccggattcaggccgttgcccattttcaggtttttggccctgtcggttctggtggggatggactgctcgctgcccaggcggtagcggtagggggaaccccatggatccgcaagaatataaagggtaaccggcctgccgtccttgcttttcacatggacttcccggacagtcgggttgcttttgggctgcgtagaggggttcaactcatcattgtaaatggttgtatccctggaaggaataccctcattcttatggtcgccgaacagagccatgtaaaccacgttggaactgtattcctccccgttggccacggctacgccgtgattattgaagggagcttccgtgccgtaggggtagcggtcatggtcgctgtggtagctctccaaccccatttcaattttgcggacaatggattccgtagcctgttcgttctttctggtttcaagccaggtgtaaatggagatggtcagcgtggccagcaccacgatgatcaccatcactaccaggatttccatgagggtgaacccctttgtttcccggagccgacggtatgcggaatgatttttcatctgattctgcttgaggggttaccccatcttttcaataacctgcaggaggggcaggaacatggcgaacacgatgccgcccacgaccacggccaggaatacgatcatgatgggttccagcatggaggtcatagctcccacggcattgtccacttcatcatcatacacgtccgcgattttcaggagcatgtccggcagctggccggtttcttcccccacgtccaccatggagattaccatgggcgggaaaagcttggaggaggacatgggcgtaactacggattcgccctccttgacggagtcatggatgaggccgatggcgtctcccacgatcatgttgccggcggtatccttcgtgatggtaagcgcctggaggatgggaacgccggaagtcaccagcgtgccgaaggttcgggcgaagcgggcgatggcgcttttgctctgcacattgccgatgaccggcatggtcagcagagcggagtcaatcttgcggcgtccgttgggcgtcttgctcatggccgtgaaaacagcgtacaggatggcgaccacagcggccagaatgacggcattgggcacaaagaagggggcggccatgaaccagtcgctgatgccgaacacaaactcggaaataccgggaagttcctgattctgctctgcgaacatcgccttgaatttgggcacgatgaccagcatcaggaagatcacgatgcctacggcgataaacaggacgatggagggatacaccatggcggagatcaccttgcttttcagcttttgagccttttcctggtattccgccagacggttcagcacgacttccagcacaccgcccagttccccggcctttaccatgttgacaaacaggcggtcaaagattctggggtgttgggccagggcttccgagaaggtggagccgccctgaacggaatctcccagagcttcgatagttacgcgcaggttggggtttgcctcctgtttggccagcacgttcaaactctggagcaggggaagccctgcgtcaatcagagtagcaagctggcgggtgaaaatcatcagagccttggccttaattttgcctcccagtttgcctttttgcttcttagcccccttggcctttttcttggcggcaggcgtctgttgaatcttgcccttgcccgcttctacgatctgggtggggtacaggccatgcgcccggatggcttccatggcctccgcttcggagttggcctccagggagcctgttttctggtcgcctttatggtcaagtgctgtgtattgatatttaggcatatatgttgtattttaagtgttttttcttggtggttgaaataaggggaagcaacggcgtccggctgtccgttaagtatatttcagcacttcttcaatagtagtgttgccgtcataaatatttctcagcccgtcttctctcagcgtggacatgcccatttcaatagccttctgtttcagcaccacggagggagcgcgatccgtaatcatgtcacgcagggtgtcgttaatatccagaagctcataaatccccttgcggcccctgtagccggaattggagcatttatcacagccgcggcccgtgaaaaagtgcttgtcccccaattcatagggagatacgccaagctgggagaggatggtggatgagggttcatacggggtgcggcagtccggacagatggtgcgcaccaggcgctgtgcaagaaccccttccagggaggccgctaccaggaaaggttcgcaccccatgtccaccagtcgcgtaatggctccggcggagtcgttcgtgtgcagggtggagagaaccaggtggcccgtcagggatgcctggatggcgatctgtgctgttgccatgtctcgcatttcccctaccagaatacggtccgggtcctgccgcaggaaggcgcggagaaccattgggaaatccaggccgatggcttcattgataggaatctggatgatgccgtcaatatcgtattcaacagggtcttccgccgtcagcaccttggaatcaatggtattgatttcacgcagggcggcatacagcgtagttgtcttgccggcgccggtggggccggtaacgatgaaaatgccgttgggcttgtggaccgtatccagaatatattcgtggatatgcgcgggaagccccaggttgtccatgttcaagttgacggaagagcggtccagaacgcggagcaccacggattctccgtactgagtgggaagggaggaaacgcgcatgtccacggaacggtttcctatctgcttgacgatgcggccgtcctgcggaatgcggcgttccgcgatgttcatgtttgccatgaccttgacgcgggaaatgaccggcacggacaggtggacggggggaggctgcatttcatacagggcgccgtccacacggtagcggattttgaattccttctcaaaaggttcgaagtgaatgtcggaggccttttccttgatggcctgtgtaatgacgaggtccacaaagcggatgacgggggcggcggcggaatcctccgtctcattgttgacctgcatgttgttcagttcctgcatcaggtcggacatggcggcggattcgcctccataaagctcattgatgcgttcggaaatctggtaatccggcgctaccagaacatggatgtcctggccgagggcgaagcgcaggtcttccaccgtctgaggattcaggggatccaccaggcagacgtacaggccttccggaccgtgccgcacagggagcgccccgtgcaggcgcacgagcgtggccggcatcatgttctgcacgttcggatccggctggaagttgtccagtgtaatgaattccgtacccaggtcgctggcgatcatctgccagatatcatccttgctgccgatgatgccgaagtctgcaagcacttccggcagttccttgccggaggcgatcatttcctccttgatgtcctttgccagggatttgtcaatcattccccggccgatgaaaagttccagtgtgaggttggtgtccataataagcagaatgaatagcggggaaacatcagttggcgtctcccatggtgacgttcagcacttcttccggagaagtaagcccggccagcactttgcgtacgccgtcttccctcaaggttctcatgcccagttcccgggcgcgctggcgcagctggggggaagtcaggttttcgttaatcatgcggcgcacctcgtcgtcgatttcgaaaatctcaaacagccccattcggcccttgaatccgccgccgcggcaaaagtcgcagccgtggggtgccttgatttggccctgggcaaggcgggacatgtcaatgttcagcgtatgcgcctgcttttccgtcagagtgccgtccaccttgcagcggtcgcacagcttgcggacaagacgctgggccatgatggcgcggacggaggaggcgatcaggaagcgtttgatgccgatgtccgccagacgggccacggcgctgggagcgtcattggtgtgaagggtggagaatacgaggtgccccgtcagggaggcgttgatggcgatgctggctgtttccatgtctcgaatttccccgatcatgatgatgttgggagcctggcggagcatggcgcgcagggcggcggcgaaggtcatgccgatatccgcctttaccatgacctggttgatgccggagagttcgtattccacagggtcttccaccgtgatgatttttttatccgggcggttgatgtggttcaggcacgcgtaaagggtcgtggttttaccggaaccggtaggacccgtcaccaggataatgccgtccggcagcgtgatgaggcggtcgaacacagcttcatcatccgagaaaaatccgagctggggaaggcccagcaccagggcggatttgtccaggatacgcatgacgatgctttccccgtggttgctggggacggatgaaacacggaggtcgatttgcttgccgccgatgctcatctggattcgcccgtcctggggcatgcgtttttccgcaatgctcatggtggtgctcattaccttgaggcgagcgatgatggggctgagcagtttttttggatgggtggccacctccaccagcttgccgtccacgcggtagcggatgcggagcctgttttccatgggctcaatgtggatgtcggaagccctcattttgaaagcgtccgtcagcatctgctgcaccagacggataatgggagcatcctccccttccagcccgtcggtttcttccggaacgctcagatcccggtaaaattcattcaaccggctttccaccgtgctgcgggtggcgacgctgaaaatcacgtcccgccccatcagctggggcaggctgtccatggtttccagattcagggggtcgtcaatggcaatgttgatggaaaaaccgtcgtcggaaatggggatggcccggaagcgcctggcaagttccggtgtaatgagttcgcgcacctcctgggggatgtgcatggagcccaggtccacgacggggagcagggagtttgacgccgccacctgagcgatgacgtcttccgtaagataattggcctgaatcagaaaatcgaccaggtcctgggtgggagatttttgactgcgcgcgtactgaagaatttcttcattcagatatccggcctgcgtaagaagttcgatgagatatgattcgttggagtacacgtcgatctctggatgctattgttggaagtctgccgaaatggagcggcaggatactcccctatttctgacaggttcggaacgtaaagtcaacttagcttccctcaaaatggcattttttttcgggcgtgtccggaggcgggaagaacctcctcctctttccgccgctttccaaacctgcgaaatctcccggaaagcgggatttttcctgttctcagggcttttggcgggggagcttggaaagcaggtcttccagctccggcatgctggatacgcgcaccaggcgggaacgcatttccttggcgccgggaaatcccttcgtataagccaggattcgtgacctcatatggcgcatcgtgtgaagttcatccccataatggcgggactccagggccatccgggcatgccgcaaaatcagggccgccttttcctgcgggtctctggccggcggcatggctccgtgcagcagataatacttggcgtctccgaaaatccatgggttttccatggccgcacggccaatcatgacgccgctgacggccgtattttcttttacataagctacggcctgcggggtggaaatatccccgttcccgatgaccggcacggacatggcccgcgcgcattcgtcaataatgtcccagttggccgttccggaatactgctgggagcgggtgcgcccgtgaatggtgatcatggaaattccctcattctccagcaggcggcacgcgtccatggcgcacaggctctgaaaatcccagccaatacgtattttggccgtgacggggattctctctcctacggctttcacgacgcctccggcaacggaagccagcaggggaagatctttcaggagggaggaacctccatttttgccaaccaccttgggaaccgggcagccgaagttgatatcgataaaatccggcttctcatggtccaggataattctggccgcctctcccatgtggttcccatccgctccgaagagctggatgcctatggggcggtgggcattttctatctttgtgtacctgcggtttctctcccatgcctggagaattccttccgcagagacgaattccgttaccattacatccactccaagctccttgcagatagtgcggaaaatggggtccgtcactccagccattggagccaggaacagcgggaaatccgttttgaagaacgggaggggagcgggacggttggaaaaagtcatgattccttaggatgaggctagcacgggttcccgtcccattcaagcatcttgcctgttctggcgaagaagggaaggtgcaagatgccggtgctgtgcaaacatcggagcgtcgaaaatatggcgctcaataaagaggtgcagtagtccgcccggttttccggaggaaattgcaggcgcgctggacagtatcgtttgttttcggaaagaaaaaacggcttcactttttgagtgaagccgtttggcaaaagttgaaagattgtcttaatggttgccgcagccgcaaccgccgtccttatggtcgtggtcgcacttgccgtcgcaatcgcaattttccttgtcgcactggccgccgcaggagcaggaggactgggcgctcatggcgcgctggcgggcttcctctatttcttcaggagtgggagcgcggccaaggtcaatggacatgcccagataatgattgatggtgttcaggagttcgtcaatggtctggcgcgcttccaaaaagccgcgggccgcatcattcttgatgacgttttcacgcagggcgtcgaatttggaaatttcctcttcggtaggaggcattccggccaggtgcttgttgcgcagttcttctccgtaagcgtttacttcttcaaaaagcttggttgcttccggattttggaaaaagagacctatttttgccttggaggccacaaccttgtcttccttggcgagcagattgcaaagggcttccgtggcggagcgcaggttgtcgttgagaacgggggtattcatatgagatttatttaatcatgccttttcgtgcagggcaatccggttgcgaggcatggcacgcatttccttgccgcagggttgctgtaggcgggaaatccggaagtaaaaaggcgttccgcttgacgtggaacgcctttttatggtgatcaacgttttttaatgcgccttgcagaattcttcaaagcggtccagagcttccttcagaatgtccagcgtggtgcagtagctgatgcggatggccttgtcattgccgaaggcgatgccggggacggccgcgaccttgtagcgttccagaagcttgtcgcacagattcagggaggtgagtcccagcctgcttgtgtccacaaagaagtagaaagcgccctgcggctccacaacactgatattcgggatggcgctgaggcgggagtaaacgtactggcggcgcatgtcatattcgtcgcgcatgtcgctgatgaagctctggtctcccgtaagggcctcaatgcctccatactgggcgaacgtgcagacgttggaagtggtgtggtcctgaatcatctggatggccttggcaatggcagccggggctgcggaatagcccaggcgccatccggtcatggcgtaacccttggaaaagccgttgatggtgatggtcaggtcgtacagttccggactgagggaggcgatgctgacgtgcttggtgtccccgtatacgaggtgttcgtaaatttcatcagctaggatgaggatatcttcgctcagggccacttctcccagggcgcgcagttcttcttcggaataaacggacccggtcggattgttcggggtagtgaggatgaccatcttggtgcggggggtcatggcttcctcaaattgttcggcggtaagcttccatccgttttccgccgtggtttccacgatgacggggatacctccgcacatgcggaccatttccggatagctgacccagtaaggtgcggggatgatgacttcatccccctcggatacggtcgccatgatggcgttgaaacaggcgtgcttggcgccggctcccacggtgatctgggtgaaatcgtattccaggttgttttccctcttgagcttttctgcgatggcctggcggagtgcgggaagaccggcggaaggcgtatatttggtggctccgttgttcagggccgcgatggctgcctgcttgatgttttccggggtgtccatttcaggttcaccgcctgccaaaccgtaaacttcttcaccggaagctttcatagccttggcccggttggtcaccttgagggtcagggaaggggtcaatgccgcaatgctgggggaaatcatgtccattgttgtggtgcagtcgtagattttgatgccttggcggaaaacaggctgttctccgcataggcggaaaaactttactcattgagcgcacccctggcaaggagaatgcttgcggcggccattctttttcttgcggagggcgttcctccctctatggaagggatttttcccgtcagcgtttcaggaatttggcgcgcaccgcttccagctccggcgtcttcagcaggaaagccgccgccaggtagacgatgccggcgcaaccgcagaccagggatatccccagcaccctggccgggaaggtccagttcaggaagccctggaggaaccatgccttgcctgcccagcacacggcccccagcaatattcccgccgccatgatcttgaccagtccggaaagcagcgtccgtccgtctacgccgcccagctggcgtcgcaggtaaaagaagtaaaagagaaaattgaaggtagtgaccacggaggtggtcagtgccagccacgccgcgtttttatgcaggatgtagacgaaacagtagttgaggccgatgctgatagccagagccacggcggcggcaatcaggggaacccagcgtttttcaagagccaggaagacgggctgcaccaccttggtcccggcatagcccagcaggcccagggaataggctcccagcacttcccccgtataacgcacggcctcctggttgaagcggccccactggtatacggcggagacgaattccgttcccaggatggagaggatgagaaaagcgggtaccgcaaagaatgccaccagccgcaaccccttggcgatgtggaccgccacctcttttctgccatctcccaccatcatgcgggaaacagcgggcagcaccaccatgcccgtcgcgactccgaagagccccacgggaagctgccagaggcggaacgccgtggtcagggcggtgacggagcctttttggagatccagagcgaaccccgtattgatgaagatggtgaactgcgtcacgcctgaagccagcacggagggaagcatcagcccccagattttgcgcacgcggggatcgtcccattggaaattgggtttccagcggaagccggttttgctgagtttggggagctgcacggcaatctgggccatgcccccgatggtgacgccgcaggcaaaaccgtacaaagctttggggccgaaggatggatcaatgaaatatccaatcagcaggccaagcaggatggaagtaacattgaaagcggcggaggccagcatgggcaatccgaaaacccccaccatgttcagcgcccccatgatgagggcggacagggaggcgaatccgatgaaaggccacatgatgcggctcaggtccgtggcgaacaattgctccgtcagagagtgatctccgctgtagagggcttccatgacgggccctgcaaatagaatccccagcgttacaatggcgatcatcagggaggaaagctgggtagctaccttgttggtcagttcccacgcggccgcttctccctgcgcttcccgcgttttggaggctacgctggtataggattgggaaagagccccttccgcaaacagatctcttaacaggttggggatacggaaagccgtgtaaaaggcgtccagggctcccgtagccccgaacagggaggtgtacacaatttccctggccatgcctgtcaggcggcaggcgaagatggcgccggaggcaaccaggctgttccgcatcagggacatgaaaggggggaatttacttgaacagctggcggcaatacggctccacccgtttcattgccggattgtccttgacagcctggtcgcgatcatcccggcaggggaaaaggtacagggcgtatcccccgtagccgcctcccagatatttttttgcaagggcattgggaatatccggcagggggcgcattccttcgtcaagctgcacactgtaatacagggctacgcctgccgccagtgtattgatgttgcgttccagaactccggtgcgggcaatgagggaggattgggagatgcgtacgtagtcccgttgttcatccgccatctttggggtatcgtgttcttcacccgtatatagaatggccattcttccttccaggaagtcacccgtgcctttgacatccagcaccggagaactgccggagcgccatacgcacaaccccgtttccgcaatgacggcaggatcctgccaaccgacgcccagagcgagttcggacgcgaccggatcgcgcccttccagcatggcccacgcgccgctgcctcccagcccggagcgtttttcatacggccattcgcagagggaaaccatgggggtgatggcgcagttgaccacataggagccttttctggcgtagcggggcacgtccagccatcccccggcaaagtccacgcgaagcggtacggcggacggagccttgatgcggttcaccagcatggtggtggagacgggagtgaatttggggggcgtcttggggagcaccacgtaattggctccgacgcgggcgcacagctccttcttgatatcgctgtaaaggtcatcttccgtcacagccaggatatccggtttttcctgaagaaactcttcttcaaaatccaggccctttttcatgccggtacccaggataaccttgtcaaccatgcgcaggctttccagcagaacttttttgtgttcgtccggaatggacggcttgcgctgcttgtggtgccacagcacgggttccgaagcgaaagagacgattagatagtcgcccagagcgcgggcttcttcaaagaactggatatggccggcgtggacgatatcatagcagccggagacgaaaacttttttcatgcgtgtaatgatagataattagtctgcaacagtatgccctattgccgtgccggatgcaagagcgagatgaaaatacgttaaaaaacggcgcggactacagaaagcccgtgccgtttggggataggaaaaatcaacttctgcaaaaacggtcaggaagccatagcctcctggtagcggcgttccacatcgtcccagttgatcaggcggcagaaatcttcaatatagtccgcccgcaggttctggtgcttcagataataggcgtgttcccaaacgtcacagacgagaatggggacaaggccgggaatttccagattctgatgtttttccgccccgcagattaccagcgtcttgctgatggggtccacgcccagaataccccagccggaaccttccacgccctgggaagccgccttgaattccttcatcatggcttccagagaaccaaatttttccttgatggcatctaccagaggaccttgcggctcttttttgggatcaggcgtcatgttggtccagtaaatggtatggagaacatggccggaagcattgaaggacaaattacgcacccagttggtggtggcggaagcgtccagtttcccgtccgcaatttcacggagcttttcagccgcggcattggcgccggcgacataggccgcatgatgcttgtcgtggtggatgcgcacggtcttttcatccagcatgggttcaagcgcgtcgtaggcgtacggaaggggtggcagtacatatttgccgtcggcatagccgatcgtggaggggtcttgctgtttagtcatcttgtgctgtggttgtatggatggccctgttgcccgggcctggctgattgttcccagcgccgccaatgaggaaagagcaataaaacgccttctgttcatgtccgcgccatgggaatgcatgggtgtttggacatgggttgtttttgagttgttcaaaaaacaggaacctcggggttctatttttcttcttgtagaggcagctgggaaaaagcttttctaccttctggctgctgctgccgggccctgggccccatagacgctgacgcccctgacggcgacagatcctgcatcccccaggaaggatttgggcagggttacgcgggtctggctgcccggcagaaggatgcgcgtagcccactggctgccgtagcgcgcctggacggcccatttccgggagggattgccggacggctgccaggagagggttacggtggaaccattgtccgccacataaaaattctgcggttgtccgggtgtgccggttccgcaccagggcatggcgggcggaacggccatggaggggtacaatctgttcaggtatttctggatgcctccggcattccgcatgatggatttgatgctccagaagcattgcccgggggcggttctggcaaggctgcgggagtagttgacctgcgccgctatttcagaggcggggcggcccgggtcttcgctgctcatgatacgtgccgtggcaatgccgggccacaccgggcgtctggagttctgggcggcccaccattgcatcaatgcgggaaagctctgcttggccgggctgcagcgccagtaaagctggggggccaggtaatccacccatccgcgggaaagccacttgcgggcgtcgcacgccagatgctcgtaggcgtccactcccgcttcaatgccgccgggaacgcccggcctccagatgccgaacgggctgacgcccacccgcacccaaggtttggaagatttgacggatttgtacatgtcttgcacgaagtcgtcaatgtagccccggcgctgggagggggatttcccgtctccaaagctggcgggagaccaggcgcggccgggagtgggataggggtagaaatagtcgtccaggtgcaccccgtcaatgtcgtagcggcgcacgacatccatgataaccttcagcgcgtggtcgcgggaggcggaggcgctggggtttatcagcagcacggagccgtttcgcttcatcaaatcagggcgcgtgagggaaatatggttgcggcctacggcatgcttgacgttggccttcgcccggaatgggttgaaccaggcgtgcagttcaatgccgcggcggtgagcctcctgaatggcgaaagccagaggatcatacccaggattgacgcccgggccggaaagccattggctccacggttccagagaagagcggtacagggcgtcggcattcgggcgcacttggagaaacacggcgttcagcttcaactgggcgcaggtattcaggatgttcagcagctccgcgcgttgggctgctccggagaggccggaacgggagggccagtcaatattatgaacggtggatatccatgccgcgcggaattcctgggggacagcgggaacggattctccggaggtctgccacccaagcgcctgggaagccagggccagcagggagcaggagaaggcatggaacaggggaaatctggtcatgacgggaatggagagggatgtttccggaatatttaacgcctattcggaggatctgtccatgacggatgccggaggtttcgtcatggacaggcggccctcagctgggctgggatgccaggctgttgatcaggtgggcgttgaaaccggccccgaagccgttgtctatgttgacgacggaaacaccgttggcgcaggaattcatcatggcgagcagggtggttaccccgcggaaattggctccatagcccacgctggtaggcacggctatcacaggaacctttaccaggcctgccagcacgctggggagagctccttccatgcccgccacggccaccagcgcagtagcttggcggatggagtccagatgggaaaccaggcggtgcaggccggccacgccgcagtcccggtaccggactacccggctgcccagaaattccgctgtcagggcggcctcctccgctacgtattggtccgaggtccccgcgctgacgatgccgacgaagcccgccgttcgcggaacgggattcggagcaatgcgcatgagatgggcttccgggtgcatgtccgccgtcggaaaggcgcggttcaggtaatccagagcttcctcgctcagacgcgtagccagaacattttgtccggcggcaagcaggctgcgggctatctcttcaatctggcccggcgttttccccgcgccgtaaatgacttccgggcacccggtgcgttccaggcggctgtaatcaatatccgtgtggaaagaggcgggtacggtgccggctctgattttttccgccgcttcctccgtggaaaggaggccttttttaaactgatgcagaatggaggtgatgtcgttcatgagggttcgttcatgttccctctggaatatccttccagatccagggtaatgtgccggaagcccagttcccgcagccggcgtgccgcggtggaggcaagctgtccgtcccagaacagcctgcgttccttttccggcaattcaatgcgggccaggctgtctccgtgagcacggacacggcaacctttcagccccagggttctcagaaaagattccgctgcgtccacgcgtctcagcagaacttccgttacggggcggttgtgttccaggcgggtcagcagacacgcataggccggtttaccgcagactgattccgggaggcccagccgaaaggccagccggcggatatccgccttgtccatggcagcttccagaaagggactcggaatgccgagctcctgcaaagctttgcggcctggccggtaatcgtccaggtcgtcgagattggaaccgtccgccagcagggggaaccccatctcagccgctctggctgccagggaggaaaacagggcgtgcttgcacaggtagcagcgcaggggaggattattcgcaagggcgggcaggatgggaaacgccagtttttcctgccggacgcccaggcggcggcacaacgccgtgctgtcccgcacttcctcctccatcacatagggagttcgcgcggtcagggccaggcagtgatccgctcccaggatacggacggcggcggcaagcaacacgctgctgtccagccccccggacaaggcgacggcaaggcgttccctggggagaaggacggcgcgaagccgttcaaacggagtctgtggcgtcgttgtcatggggaggtatgggaaaaagccccatcagctgacattgtcccagcggcagcccggttttctccgccaggattctgcaatcttcaaattccgctttccggtaatggggacgaccgtgcatgaaagaagtttttacatgaaccgttccatggggagtgtggacgggggagctttcccggcgcagaatatggcggagcatgccatgctgcctgatgcccggcgtactgctgtgccggaagaaggcttcccgcacgcggtccgtctgttccggcaggcacagggcgcaaaccttgactgccagacggcctttcttcatgcagacggactcctgccaggtatccagagcgcctgcctccatcagcttttccgccaggtaggctgtctgttccggcgtcatatcgtctatattggcgcacagctccgtcagcagttccggggaagtttcctcttcttccgtttctaccagcatcacccgcagaatattcggtatgggaagtccctggcggtggccgatcccatagccggttgcggtaatacggcctgccagcggagaggggacgggctgcgccagggcggcaatgtaggcagctccggtgggtgtagtggcctcatgggtggttccattcaaggtggcccggaaatgtttcgccagcaaagccgttgccggcgcaggaacgggcattgttccgtgctggcaggttacggtaccggaccccagctccaccggtccggtgaagacggcgtccacccggagcatttccaggcagatggcggctcccgcgatatcgatgatggaatccaccgcgcccacctcatggaaatgtacttcttcaggagtagtgccgtgtacgcgggcttccgcctccgccagcagggtaaaaatagaaagggcagtccgcttgacggtattggaaagggcgcttgtctcaataagttttcttatatccgccatagtccggtgatggtgcgcatggctgctgccggaatgcccttcttcctccgtcagcacgtcaatccttgttccccggatgccgtgctgctgcgcccggctgcattccagcttccactccccgtgcacatgcaatttggacaattcccgttccaggttttcccggtccgctcccaaatcaatcagggcggccagattcatatctccgctgatgcccgcgctgcaatcatagaccaaggctctcatgatgacccagtgtagaaggaaaaactcctggctcaaggtcaaaatgagccctatcccgggagggggcccggtgcctggcggaccgggtttggcggattgccgtccggttatgagaaagatgccctgtgaaatacattgctaggaaactttaaatatgccacaatccctgcgacgctgaccagcgccgcccccgttctatatcatgtccattccgttcttttcgaaattacgatcccagaagcattatcttcaactggttaagccggaattgaagcaggtttccgagtttgttgaagcgcaatcatcatgttttgacccggaagtggccgattacatggaaacggtatgccagtccaaggggaaaatgctccggccggccctggttctgctggttgccggagctacgggcggcatcaagcctgcccatatccggctgggtgctctgctggaaatggtgcatctggcttcccttgtgcatgatgacgtgattgacgaggccgacaaacgccgggacgaggctacggcgaatgccctctggggcaacagcctcgccgtactgctgggggatgtcctcttttcccacgccatggtgctgggtacggaattcggcagtacggaattctgccgcaggctggcgaataccgtcaggaacgtatgccagggggaggtggcccagtccagccgcctgtatgatctgagcatgactcgcgaggaatattttgaaatcatccggaaaaaaaccgcttcccttttctccgcagctacggggggggctggctggatttccggagtaaccccggaagtggaggaatccctttaccagctgggggatttgctgggtgtggcctaccagatttacgacgactgcctggacatggtgggagatgaagacgatgccggaaagacgcttcatacggacgccaccaagggcaagctgactcttcccatcttcaatttgctggaatgcggtgacaggaatgtggaagctaccctgcgggacgccattgaaaaccgtgaagtggttgattactccgcctttcaggataatcccgtttttgcagaggctctggacaaggcgattcaggtagctctggagaaaaacgaggcggcccgcgaaattctgtggctacttccccaaacggaatatcgtgaagctttggcggaaatgaccttttacatggacgagctgcttaacgactgccgtatctcctgacctgcttcaaggaatttttgtccggtcatgtccttatgtaatttgtgtcttccggcattttcccaaaaggaaacctgccggagggaatgggaggagcgcgtgctggtacggactgattgttttttcaaaacatggttaaacccggccacgcgcccgggaacggcagtgctttctttattccgtttttccgtacctgcgcgcccggaaggagtaggcgaccgccaccacggcggcgagcacggcgtacaggatgaagcggtccgtagaaatggcgttggctgattctccgttggacaggaaaaaagtaattgcggccaccagcatgttgcctgcaaagatagtgaggttccagaaactggtgatgaggctttttaaatgcgccggggcttgcgtataggcgaattccaggccggtggtgctgaccaggatctcagagatggtgagtacgcagtaaggaatcagctgccatgcgatggacatggaggttccttcctccagccggtattgcaggaaagcgacaatcaggaatgtagcggagctgagggccaatcccgttccgaggcgcaccaggggccttgccagcgttgccaccctgggataaacaaatacggtgatgagggggatgaacaccatgacgaaaatgggattggccgcctggatttgggccggcccgatggaccaggaaccgcccgggagcgggatggaaagaggaatcatcctgctgccctgggatacccaggaagaagccgtctgttcgaaaatggaccagaatgggatgataaaggcgaagatggagaggattttcaggatgtgccgggtgtcttccacggcagaagttccgcagcgctgttctgcgtttttccagcctccgtggaacagaatgatgaaaaggactttccagaagccaggctgcccgctgttccgggccggaggtgtcttgtggtattttttgcggcccagccagaagacgaaagtggcaactcccatgaagaggcccgggacggcaaacgcccaactgtacccgtaacgctgttccatggccggaatgaccaggaaggagaagaaggagccaaggttgatagcccagtagaaggcattgaaagccttggtcattaactgcggggacttattaggaatctggtctcccataaaggcggagacgcatggcttgatgcctccggctcccagcgcgatgatgaacaggcccgccatgagaatgtaacggcgcgcttcaatggtgtggaaaagatccgccgtcgccagaactccgtgtcctacgcagtaaagcagggaaatataaagaatggttttatatcggccccagaccttgtccgccagccaggcccccgccaggggaagcagataaaccattcccacaaaaatatgaagggtggaggtggcccagttgtcgctcatcagcagatggcccgtcatgtacagcatgaggatggacttcatgccgtagaagctgaaacgttcacaggcttccgttccgatgatgtatctggactgggagggcagggcgctcattggataatgaaaaggagggagatggagtaataaaaatgatggcctccgggcggaggccatcatggcgaatgcgttcagacggcgttcagggcctgtgagaaggagacgggctcactgacggttgtcatgaaaaggaaaacattagcgttcctggttcaggatgggagcgatttccaccttatattgggtgatgcacgctttcagccagtccagcatgatcatggattttgcctgggctgtcagagccggagcaatttgctgggtagatttgatttggaattccggcgtatcctccagttcgcgcttgacgagctgggtcagcaggatgccgtcccccgtgttgatgggctgagccatctggccggggttgatgacggaagccgcctggaatacttcttcaggggccgggagctctttgggaggggccagacgggaattcatggcccgttccagaagagactggagctcttcctgtgttttggcgttttgcaggttgacgctgctcaagagtacgtttggattgacaaagggaccgtaagaggaagttttggcaccggcttttccggcaatggcattgaactgttccacggggttttccgccttctgcaattccgtattgagttccgtggcggccttattcatggattcaacggtcatactttccagcaggtcggcgcgggcgctgttgcgggcggtctcgtaaggcagggctttgaccggggtaatgccttccagacggatcaggacgacttgtccgttttccagcacctgcatggtgctgatctgttcggctccggtcttggcgcgcgcttcttcaatggccttggcatccgcatccgcactcagggccggggctcccgccagggagaaagccacatccagcagattggcgctgcgtccgtcggaagcggattggttgattgcctggttgatttcctgaggcgcgtttttacgcgttacggccgtgtaggactttttctccattttgcagacgccgggagtcttggccagggcttcgctgatggcctggtccatgttcctgccgttggtggcgttcagcggttcccagatgtcattttccaccagattcatggtctccatggtggcgttggaaatgtctccgggcttgggtgcctgggcatcgcctacgggaatgaaggtgtaaacggtgaagaagcgagcttcctcatttttgtaattttccttgtgcttgtcccagaaggtttttatttcctcttctccgggatccgtcttggggcggaaggcgcttttttccaggaaggcggtgttgattgtaatttgctggctgttggattccgctacagcctcggcaaaaccgggctccacggagatacccccggccagcacgtccttgatgcgctccaggctgatggtgtcttccatcagaccgcgcagcagttcctcctgaagctttttacccatgttgccacgcatggaaatgaaattatcgtatttttgggggtcgaaaacgcctttatcgtcctggaactctggaatattgcaaatggcatcgtcaatttccgcggtgctgggagtcaagcccaggcgtcccgcctcccggcggataatgccgcggtaggccaggaaagccgcattgggattatttgttttcagcagatggcagagttcgcgcaggttttcttccgagctgaaattgtcctgaagcagcggaccgaaggtggaagggaaggagaaagccacggacaggccggtcctgcccatattgttataatccttttccccgtaagatttcccgtccacggaaacgaaagtctgcttgaacatgccggtcagggagccgccgcttacgtccccgccgacgaacatgaggcccacaaacaccagggccatggctgccatgatgacgattgtatgtttacgtaagtaatctagcatggaatgtcaggttgaaaatgtacgtgtagccggccatgagctgacggcagcccgggcagcccgaaccttttacactttttccctccgctaggcaagaacgaagctctccgcttccggcggcttttccagaacatggcggcatgctctttcctgtcatgaagggcttttccggccggggctgaacaatttttgacctcgacggtgatgcaaatacgccttatgttgctcctgcgcggaaggttccgggaaccatgggccggttctgccccatggcattcggaagcctccggtgcatgtccttagccggatattcctttaattgcaaggatttatgctgaaccaggtagtagaactcaaaagagaagtgacggcggtccagatccccagcggggatgtgctcaccctgccggaaggggaacgcgtgtatatcacccagatactgggcggctcctataccgtggctacggaccacggcctggcccgtatctccagggagaacgcggacgcccttggcgctggagcggaggaaccttctccggaagcggctgcgctggatgagaacgccacactggaagaaagggtctgggatacgctgaaatgtgtgtatgacccggaaattcccgtggacatcgtcaacttgggtctgatttacgatgtggccgtcattgagctggagaacggccttcatcatgtggcggtaaaaatgactctcacggcgcccggctgcggaatgggtccccatctggtcatggaagccaaggaccgcattgaagcgttggaaggggtggaggctgcggatgtggaaatggtgtgggatcccccctggaaccaggacatggtcagcgaggagggcagaatgaaactcggattgatttgatttcccatgccggtgacgttgaaattgtccgacgaggaagcgcgtgatttggcggaaatgctttccactgccgccacggtggctgcctccaaccagcaggacggggcggaggcgcgtctggcggcgtgggggaatttggtttcccggctgatgaaagagctttccgtcacctccaaattgaaagggcgcattgcctatgcggatgagctgggcggatatgccttcacccgggaatatgaagaaagcgcctttttccaggattgcctggatgaataccgggacaactctttttgggcggatctcgtgacgcgtatggcggacaaggccatcagcgaacacctggggccggaatattttgaaaacatgccggaggatgaacgccgccgtactgcggaagccctggaaaaatccctgtggcaggaatgcgccagatacggcattgaccggctgggcttcatcttgcctccgtcagacggataaggagaagaaccgtttaaaaatcctgtggaccggtgcggcccgaatgattcgggcgcgattcgcgtgcatatccccggagaataccggtctatgttgcctgtctgccgggaaatactcccttatatccgccctgtttcaggtatcgggacgacatgcgctctctctggatgcggcaagatgattttgggggagttgttcagtccggagtgcagcggttcaccgggtcggggccttattcctccgcattttccggcagtggcggggtggggctgcccagatattccgtttccttgggggtggagagtactttgtaatacgcccaagcggcggcggccagtacgccgccgatggaaacaatcatggttagccagccggtgggggacataatcagttaatgttctcctgaacaagactggtaacggccttgtcaggcaggaccagcttgatattctggggcaggggacgattttggaacagcttgaaatccgtcattttcgtagttccccccgtctgaagcagcacggaaccatcaggctggatattcgccatgacgttggtggagggggttgggtcgccggtgaacgttacgctggtattgggatgccatttgccgtccttgtacgcgaagctggggccaaagaaggctccgcgggccttcttggctgattcaaaattacgcatgaaatcttccacgaatccgacggagaaggaaagttccttttccgaggaatgcgttttccatttggaaataagatcccaggacctgcttttattattaaagtaataaccgctgatttccttgaatttccccatttttttgacgcagacgaggaagcgcatgttctccccgattgcccagggatagtccacgaagctttgtccgcctgttccttcaccgccaaaacgtccggagcgcgcatctttgcccagttttaccagcttggtgcgttcttcttccggcacatcattggggttgtctccgtgtgccaccggatcccagatggagaagatgattacttttttaccgttggattgttcctgaaaaccgatatagccgtcgtcaaaattcatggcgcaaaagtaggtgccgggaacggatgttttggctttcactacattgtacagggcgcttgcctgggagggatgcccctgctggttgatatggacggaacggcactggcgcttggccagcagttccgggtcctgcgcatgaaggatggttccggagaacagggcggcgcaaatgacggcggcggaggataaaagacgcatggttttgaatgattgatggttgtctgatttgatgcccggagggcgggggacaggcaaataattaggacaggctaattacgtttggcctgggggaaatctcgcaggcaggccgcacttttttcaaaatttttccggcatgaatgtgataaaagaaatacttggctcaggctggttgctcaagattctgaaacggctgaaaccgtaagtccggaaggccgggcagccgcactctctccttccccttcccgctttcagccagacgacgcggaacatacagctttgcttgaatggggaaggccgttctgcgaaaaattcgggaaacggccttcggaagaatgggggaaaaggacgcgtttgttaccggatggggttcaggaacaggggcatcaggccccccagcacgatgaagatggaaaacgcggccagcatgactccggaaatggccggtacctgcacgggctctgcgttttctgcgggcttgtcccagtacatggagcggatgaccttgaagtaatagtaaaacccggatgctgcgcagacgatcatgacggggagcatccaatccagatacagacccgtattgatgacgtgcacgaaagaaatcattttggcgaaaaatccggccgtcagcggcacgcccgccagggaggcgaacatgatggtgaccgccagcgccagccggggattggttttgcccagaccgcggaacgcggaaatttcctcgctcccgcgctggatgcggatcatggcaagggcgaaaaaggcgccgaaggtcatgaccaggtacacagccaggtagaacggggcgttcggagccaactggccgtccacagtaccgataaacaggggcagaatgaagcctgcctgtgcaatggaagaataccccatcatgcgtttcaggttcgtctggggaatggcgcccaggttgcccaccagcagggtggcggcggccatcagggctacgacgaattcgacgggaggcagcacggcgaatggggccaggatgatgccgagcagggcgaatccggctaccttggaggctacggaaaggaaagctgtcaccggagtgggagctccctggtacacatccggaatccacagctgcatgggaactgcgccgattttgaatgctgtaccgagcagcagcatggcgagggccaggtacatggcgggggctgtctggccggccagggcgtggctgacgatcgtttcattataaatgaatgttcccgtaatgccgaaataccaggccaggccgaaaacgagaaaccccgtgctgacggcgcccagaatcaggtacttgatgcccgcttccgtggaacccaggttccgccggaagtagcctaccatgatgaaggaactcagggtgagcacttccagggagacgaacagttccactaggttggatgccttgcacagggaggtgatgcctacgcaggccagcaggggcaggatgtagaattcccccgttccgtcctgggatttggaatcattggaggaaaggttgatgacggcccggaaatctacggaaagcaacagggtgactgctgtggcgacgagcgccaggatgatgtagatgttgtcatagagcccttccatgtagaagggaagcatcgccagggttcccgccgcgccaatcagcccgaaaataaatttgggcgtttttttgcagaaggtctccgccagaagcaaaagcattgccaggccggccaggatgaattccggaatatacgcttgcatgggtaaaagagaatcaggttagactaggattgtattcggaagggaggaaatcaggagaaaaactggagcaccagcgtggggaagaagccgaagaccgccagggcgatgaccaggaagcagttggccgcccgttcggagggctgcagtcccgtggcgtaggcggaggctttggacaaatctccctggaaaatattgcggtaggccctcagcatgtataccgcgccgatgaccagtccccagaggcacaggatggtggcgatttgaacggggccgaagccgttgctgaaaccggcgaaaccggagaagaagaccatgaattcccccgggaaattggcgaggccggggaggccgatggaagccatgcccgctaggccgaaaacgaaagccatgcgcggcagcctggtgctcagtccgcccagagagttgatttccaatgtgcctgtttgcttttcaatctgcccgcagagcagaaagagaagggcgattgtcaggccatgggccagcatcagcagagcagcccctttcagcgcccagggattggcttccgcggaaccggaaactaccagggcggcgaaagccaggaagatatagcccatgtgcatcacggaagagttgcccagcagcaggtccagccttttctggttgacggtcacgtaccccacccaaatgacattgcagacgagcaggaccagcaggatattcgtccagggaaggaatcctgtttccatcagcggctggaacatgaagagcccgtacaggccaaatttcttaagcactccggcatgcatcatcgctaccggagcgggagcggatgcgtatgcgggggctgcccaggaatggaaggggaagagggaaatcagcgtgccgaatccggcgatgagcagggccccgatgagttccgcgtgggcaagttcgcgcccgctggccatgaagtctttcaggccggagaaggtgaagccagcctgcgtaccgatcatcagcagggctgccagcagcaccatggaggcaagccccaggtaaagcgtggcgcgccaggccgtggtgcggcggtcgccgcgtccatacaggccgatcatcacgaaggtggggataagagccagttcatggaaggcgaagaaggagattatgttgtcggacaggaacgccccggtggcgcctgcggaaatcagaagggcggagttgtaccaggaagcttcccccccctggggcgggttggtgcccaacacggtggcgaaggtaaccaggatggtcagcagcagcattactttggacagggccggggccaacgtgagctggaggtccatcccttcaaagcgggaccagcaggaagaacagccgtcaaagctaaccagggcccagatgccgagggccagcgtcagggaggcgctgagcagggctgtcgggcgtgcgggcgccttgcacagaccgatgagggccgcggcaatcagaggaatgagaacaagccagataagcatggtatgtgattggttggttaggttagcaggaatagaagacggtaaagtagatgaccaggagcaggccaatgccgaagagggccgtataggcggccatgttgccggactgcaggcggcgcagcagggagcctatggcggcggtcaaccgcgccagtccgccaacgatgaggccggagatgatgaactggtccataaagtcgatgatggcggccagaacgccctggactcccctgaccagcactttatcatagaacagatcaatataaaggcggttggcgagagcccgggaaacggcattgccggagagtttgtcagaagccggggatcctgcgtagaaggcagccgccagcaggattccgagcaccagcgcccccatggagacgtagaagggcatgcccatgtggaagctttcggaaacgaatccgttgaaaggaaccagcctgtctgcgatgaacccgtagccggagatgagagccaggacagccagaatcagcaggggcaccagcatgaggccgccaacttccgaggcgtgttccgaactgtggctgcggctcttgccgaagaagaccacaaagatgacacgcatcatatagaaggttgtcagcagggctacgcccgcgccgatccagaagaagaccgggtttttgcgaagggctgcttccagaatggcttccttggagaagaagccggacgtgaacggaatggcaatcagcgccatggtggcaatgatgaaggtgagggaagtcagcttcatgcgcttcatgatgccgcccattttccagatgtcctgttcatggtggcaggcgaagatgatggcaccggcgcccaggaagagcagagccttgaaccatgcgtgggtgaagaggtggaacatggctgcctccccggccagaagtcccagggccatgaccatatagccgagctgggagagggtggagtaggccaggacgcgtttgatgtcattctgctgggtggccatgaaggcggcgatgacggccgtaatggctccgatgccggcaatgacattgcaggccagggcggggaaggcctcaatgccgatggagtattggacgcgcaccatcatgtaaacgccggcggctaccatggtggccgcatggatcagggcggagacgggggtggggccttccatggcgtccggaagccagacgtgcagcgggaattgggcggatttgcccaccgctccgcagaagaggcacagtaccgtaatgttcagcaggttttcactgattcctgcgggtatttccatcaggctgaaatccagcgtgttggtcagcgcccagagagtcagaatgccgatcaggaagccgaagtccccgacgcggttgcagatgaaggcttttttggcggcgttggcggcagtgtcccgtgtgtaccagtggccgataagcagataggaggagaggcccaccaattcccagaagataaaggtcatggcgatgttgttcgccaggacgatgcccgtcatggagaacatgaaaaggctcaggcatgcgaagtagcgtgttttggccttgtcgtccgccatgtaagccagagagaaaacatggaccagtaggccgatgcccgtgaccaccagcatcatacgggaggaaaggggatccagcacgaaacccaggtccacggaaaagatgtcggaaatcgggagccaggagaaggaatcggatccggtccggtccagcagacccagggaaaggacgaaggtcgccaggcaggagaaggtggaggtaagcgccgcgacgtcaggacgtttggtcagcaggaaccagtcaaaggcggctacgaccagcggcaggaagagcagaagccaggtgtattgaatatcaatattgaacatgttcgtggagtagtgtgttgctcttagtctttcagcgtgttgagatcttgcgtgctggccgtgcgcctggccctgtacagggagacgatgagggccaggccgatagccacttccgctgcggcgatggtcaggataaagatggagagggcctggccgtcatagttgggcaggcccatagtgccctgggcgcgggaaaacgctaccagggacaggttggcagcactgagcatcatttccaggcacatgaagatgacgatgatgtcgcgccggacaatcacccccatcaggccgatggcgaacaggacgccggagaggatcagataatgcgtaagaggtatcatggtgatggctgtggtaaggggttctttattttccggaagggcggcggctcagcacgacgacgccgatggaagccaccagcagggccagaccggcgatgaccaggctccggttgtatttgtcaaacagggtacggcccagcagggcggtgtccgggaattctccgttgtctatctcctcacggatggtggtgccttccggatagaggtgggcggaacattggggggagaggggggggagaatgacggaaggagcgccgttgttgcgaaggctacaggcgggagtttccattccggttttggagggggctgcgtcctcctgcccgattttcaaatcgttccaggcctgttccgcgctggccatcgggcagcggtgcgtttctttggcgccgggcaaagaatagatgatgccaataagctggccgaggaagaggcaggcgatgatgacaccgatagcgacggagaaaggcctgctgaagggggatgtttcctgcttcacattcagcagcatgatgatgaacgcgaagagcaccataatggccccggcgtatacaaggatttggagaatgcccaggaagtgggctcccagcccgatcatgacggcggcggtggctccaaaggaaagagccatcatcatggcggaggagacggggttgcgcatgaagacgaccatcagggacaggaccacggccagggccccgaaaacgtaaaaaagtatgtcgctggcaaagatgttcataacgtacgggaaatggagtgttcgggggttatttgtattggttccacttgttgaccagccccttgcgggtgccgcccagttcgtagagcttggccttgttgtggatggcctgggttttatccgtgggggtgaacaggtagttatggctcatgaagatggcctgttccgggcaggcttcctcgcacatgccgcagtagatgcagcgcagcatgtcaatctgaaattccctgggggctttttccactttgccccacggtccttcctgtatggggccgggggtgatggtgatggcgcgggccgggcagatgaattcgcagagctggcaggaaacgcagcgttcacggccgtcttcgcctttcaccagcacgggagctccgcggtaatatttcggcagatgtttgtcccatctggcttccggatattgcatcgtaacgccgatgccggaaccggccagttcttttttgttgcgggatttgcccagcagagccagaacgaggtgcctgatagtgagccaaagaccgccaagaatggattgcagatagaaccgctctccaagggaaatcttcggacgcttgatcgttttgaaggccataatagtaatgttgtcggaatgaagaagggggggattacttgacgaagtacaggatggcggctgtaaggaagatgttgatgacggccagttcaaagaagaccatccagccgagcttcatcacctggtcatagcggaagcgggggagcgtccaccgcacccagacgaagaagaaggcgaagaagagaagcttgagcacatatgcgatgagctggcagatgaccgccacccagttggctacgttttcattgagccagccgtccaggccgaagccgatggaccagccccccaggaacagcgtgatgacaagggaggatcccaccaccatggcggcatattcccccatgaagaattgggcgaatttcatggaggagtattccgtatggtagccgcccacgaggtccgtttcacattcggacatgtcaaacggcgtacggttggcttccgcaaaaatggaggtgaggaatatgatgaaactgatagctacgggcaccagcagtatccagcgctgccagctcaggccctcgccccacacgggaagcaggagccagccgttggcggcctggtattccacgatgttggacaggtccagcgtgctgtaaatcatcagcacagggatgatggacagacccatgctgatttcataggaaatcatctgggctgaggagcgcacgccgcccaggaaggggaatttggagttggatgaccatccggccagcaccagtccgtacacggagagggaggagatggcgaacatccagagggggcctacgctgaggttggccaccgccatgttgacgtttccgtaagaggtttgaaggtctccggcgaagggaaccacggccgccgtcatcagcggtggcgcaagcaccaggatgggagcgatccagaagtatacgcggcgtacgaaggggggcgtgaaatcctgtttcaggaacagtttgccgccgtccaccatgggctgcacgagaccgaagatggggatgtcgcggtccaggcggaaaaaacggcacaggttggcgattttgccgtcatggggcaacccgaagtagtccagcgtctttttgaacggcaggtcggatttcatgccgaagcggcggaagatgcttaacggaatgccggcgcggttggggcctacgcggtcctggatccaggcggccacccggcgttcaatgtacacgcagaccggaatgaacagaatggtgatggcaaagcagatgacgattttgatcagcagagtgatgatataaaaccacacagggttgctgagcacctcgtcgcaaaaggttagaatcgaatcaatcatggcggattaacaggttgtatgcgtgtgaagtgtgattagcggccctggtttttttcgcgttccaccacgggaatggtgacgccggtttccagaatgggctggcccccgtctccgatggaaccccaggagactccattgagtgcgccgtattccgtgctcatggcggtgaggatgtccagggcggagttgaagtctttcagagcaggattgcctcccagcagaagggtgatgtctctgaaaatctgccagtcgtcccgggcgtatcctatgggctggatagcgcggttcaggcgttgaatacggcccgtgacattaatcatggtgccgaatttttcagcgtaggtgacgcccggcagaaccaggtccgcatggcgcgccgtttcattggcgctgtgggcggtcatgaacaggtagtccagcttgtccagatcttccgccgtgaagcctgcttccggggagatgaggtcttcccccagggagaggatgcccttgatggaaccgctgcgaactccttcgcgaatggcgtccagcctggaaccgggttcgatatccagcaccagcctggccccgttcgtgttcgggttgcgatccgcagaaataagcatgccgtcgctttctcccatgcggggaacgatgtccaccatatccgtgccgatttgggcggccagatggcggaccatgtaaagctcttcattggtcatgcgcccggaggcaatgatggcgagctggttcggagcaatgcgcttgacggcttccgcggcggaagccagagccggttcccaggtggaggggcggtggggcgcttccgcatccgtacggatgacgggctggggaatgcgggtttccgcattgatgtatttgtagttaaggcggtgagagtccggcatccagcaggagtttacggcatcattctggcgcggggtaatgcggtataccttgtcttctcttgtccagagggtgatattggtgcccgttccgcagtccacgtcaatggtctttgtttccttcaggaaccagacgcgcattttaaagcggaaatccttggaagtaagggctcctaccgggcagaggtccacggtgttcatggagtagttgctgtccagctcgcggccggggtaaaccgtgatggcgttgaaggtgccgcgttgggacatggtgagcacctcatcgtgcatgatgtcgcgcatgaagcgcacgcagcggccgcagagcacgcagcgttcctggtccaggttcacgcgcggaccaatgctcaggttttttccttttttggtctttttctcttcaaaacggccttccacctggccgtagtcgttggagtattcctgaagcttgcattccccggcctggtcgcagatggggcagtccagagggtggctggtgagcaggaattccattacgccgcggcgcgcttcactggccagggggctgtccgtgcggatgcccatgttttccgccaccgtgtttgcgcaggagatgatggggcggggcatccactggatgcgctgatagccgttttcatcataggagggtgtctgtcccggagcgagcctgggcggcatcccctgttccaccatgcacatgcggcaggagccggcgacagccagcttggggtggtagcagaagcacggaatgggcacgcccacggaacggcaggcgtctgcaatccgcgtgccgcgcgggaaccggtgccacgttccgttgatttggacgttcaccttgccttccgcggcggcaatgtctttggggagtttggaagcttcttcactcatgatgacggatgggagagggatggttttgagaactggtgttgcgtgctgctgtttagcgggtgaggaaacggttttgctccctgccttcctccgtgtggggcagacaggcgttgaatggatccgtcagggctacgaattcctccttgaatttggagaccatggcctgggtgggccaggaggcggcttcaccaaaggcgcagaccgtttttccttcaatctggttggccacttcaatgagcagatccacatccgacggggcggcttttccttccaggatgcgggtgctgagtttcatcatccacggacagccttcccggcagggagtgcactgcccgcaggattcatgggcgtagaaacggttgatgttgttcatggcccagggcatggagcgggagtcgtccatgacgatgaccgcgccggaaccggacatggagccgtgctgggcgatgctgtccagatccagcggaatgtcgaagaaggtgatttttcccatggtgccgtccggattctgcactttgtattccgcatccgtgcgcatgaccttggaggaggagccgccaggtatcacggccttgaactggcgcccgtcccgcgggccgccgcagacgtcatacagcagttcaccgaaggtcatggagccggagacgatttcatagaacccaggacgtttgacgtcgccggaaaccccgatgatgcgggtgccgggggaacgtttggctccttcctggctgtaggcttctcctcccatggccatgatgtgtttcacctggcagagggattccacgttgttgacaatggtggggcatccgtacaggccgatggcggccgggaagtaggggggcttgatgcggggataggggcgatccccttcaagggagttgagcagggccgtttcctcaccgcaaatgtacgctcccgctccgcggtgcaggtggatttccagattatagccggatccctggatattgctgccaaggaagccgcgttcgcgagcttcctggagggctttgagcatgatttccgcggcgatgggaaattcttcgcgcatatagatgtaagcctgatgcgcccccaccgcgtagctggagatgaccattccttcaatgagctggtgtggatcctgatggacaatgtagcggtccttgaatgtgcctggttcagattcgtcacagttgcaaaccagataaacaggcttcgtgttgttcggcggaatgaaggtccatttcacgccggtggggaaccccgcgccgccacggccgcgaagaccggattttttcacctcgtcaatgacggccctgggctccatgccgagcgcctttttcagttcttcataaccgccgtcggccagatagcagtcaatggaggtattccagccctcgcggttgacgtttttcagaatgcggcgcgtttccctggggtggggttctttaccgggaagataggtgatgctcatggcgaaaatctggtgcgtgggaaatggaaagggttaggctgtctgatatttggcaatcacttcttccagcacttccggagtgactttttcgtacaggagatcgttgaccatcatgttggggccaaagccgcagttggccaggcattccactccttccacgctccacaggccgtccgggctgactccaatggggtggtggtggtcgatgccgtttttgtcaatgcccagacgcgtgcagatggcgtcgaacaggctgtccgcccccgccatggcgcaggaaagagtgcggcatacgcggatgtggttttttccagggcacatctggcgcagaccgggatagaaagtcaccacgcccagaacatgggcggcggagatattcagtttttctcccacccaggcaatggcgtcgccgctgatgaagccgaattttttctgtatttcatgcaggatgggcaacacggcggatttttgcttgccttccgggtaatgcgtaacgtattcgctggcggcggcgtcaagttccggcgttacttcaaaggccgggtaaaaccgttcgcccgggctgggctggtgggcgatagtcgcgtcgatggcgttttcagcgtaatcggacatggggagaaagtttggtgtttgcgttgaagtggatgaaagtggcgggtgtttaacggtcgcattcgcccatcacgaagtcgaaggagccgagaatggccggaacgtcggaaaccaggtggcctttcatcagttccggcaggatggacaggttgcagaaggagggggagcgcatgcgcaggcggttgggaagcccgccccccttggagtccaggaagaaacccagctctcccttcgggttttccgcggcaaagtaaacctgcccggcaggggcgttcacccccatggtcgtcgtcatgaactggcgaatcagggattccatgtccgtcaggacttttttcttttcaggcagcgtgcctttggtgtccaccatgttgatggggccgtccggcatggtttcaatgacctggcggatgatgcgcagggactggcgcatttcttcaatgcgcacggtaaaacggtcgtagcagtctccgtgttcgcctacggggacgtcgaattcgtaattttcatatcccagatagggggtgagtttgcgcaggtcccgcttaatgccgctggctcgcaggttggcccccgtaataccccaggaaagcgctttttcacggctgatgacgcctacgccctgaagacggtcaatgaagattttgtttttgagcaggagggcttccgtttcatcaagggttttggccgcttcatcgcagaagacgagcacttccttgagcatttcattgggaacatcacgtgtctgtccgccgatgcgggtataggaggaagtgaagcgcgccccagtgagctgttcgtaaaaattatggattttttcacgttcctcataacagtacaggaaaacggtcatggcgcctacgtccatgccgtacacgcctacgcccaggatgtgggaggaaaagcgggaaagttccagggccagtacgcgcagggcctgtccgcggggcggtagttcccatcccagcagtttttccaccgcgcaggcataggcgatgttgttggacaggggggccaggtagtcaaagcggtcggtgtagggaacaaattggttgtactggatggtttcgcctattttttccattccgcggtgcagatggccaaccaccggatcacagctgatgatttcttcaccatcaagttccagcaccaggcgcagcacgccgtgggtggcggggtgggaggggcccacattcagggtcatcgtttctccgagcggttcggatgtattggtgagatagtctgcgttagcggctgtatctgcaatggcgaaagttttggtgctcgtcttcatgtggatgtccgtgcctggctgaacctgataatggtgccggatgattatgccacttcacaccatgcgggcaagccaaatgtcagtttttttggcattccggggaggtggtgcgcgagtctcctcaactgatgaatgttagtcctttctaacaataagcttttatatggaacctgccgaatatgggaaaaagcggattaggaatccgcatataacgtgaatcccgaaaaggactacgcagggaggccggctacaaaggaagaagattctcctccgctgcgttcggacacgtccagccataaggcccggcagccctgttttcctggcacccgccattcggaaataactgagcaaatttgcattaaattattttttctcaaatttgtaggttgactccggattcctaatccgttaggaaaaaaaatatgttgaagccgaggagaatttttgtctttcccattgctgtaacattttcagtattatttattttatatattatttcatggttttcccctattgccggggattcctttattcacgacaggacggggtaccttgggcagtttcatatccgccatgtctggaaggcctgcgtggacagttacctgtattggaatcccaggctgggggaaatggctgcgttttttattacttctgctccccggctggtctggacggtcttgaatcccgtgtttgtgcttgcccttgttcttggcctttatgtgctcgctctggggagaatgcccaatctccggcgggagtgcggagcatggacgtggttgtttgctttaagcatgttcgtctcagccggggtaaccgtttattatgtctgcctgacacgcgcaggctccatgaattatgtgtggaccggatgcctgatcgtatggttcatgaatatttacagaaccaggtgggggaagcggataacctcccctcgatggggcctgtcctcaggatgtctgatttatgggattttctgcggtgcctgtaatgagggggcgacgataggaatggcggcggcgttttgcatcatggccgcggttggcatgctccgggaccgcagggttggcgcttatgtatggtgcgggtttgccggcgttgcgttgggaggcctgtttctatttgccgcccccgggttgtactcgcggcttggccatgatttgggagcgagtgaagttttgaggaagggcggtttttgcgcctatgcggagtctttcgggatattgctttattaccacgcgaggatgctgtgtaaaatatatgccgtttccgcagtattaacgggatttttgttgttcagcggcacggagcggtgccgggaagtaatcaggaaggaaaaggaatccttcttttatattctttttttattgttgctggggggcatcatgtccgtttgttattttccggtgtgcattcccgcccatcatgttcagttcgtgtcgtccctgcccgttttggcggcgtcaaccgtgttgttctccgtattgtaccggaatgagatcatggtgcgcggattgcgcgcggtgactgtttgccttgccggagctactttgtttttcggggtggtgttcaccctggagtattatcatgtaggctctcaggctttccagagagaggagctgattcataaggccttccaggaggggaatctggaaccggaagttccttccatctctcctcttttctttgaaggaaaagtatccggaacggatgggaattggggtgggccggataccaaccgccggtttggcatccgcaagctggtggtgaaaaagccctgagggaaaatggctatttgactatgttccggggagtgaagtgcatttcctgttcctcgatgccgaattgccaggtggccgtttgccacatgttgacagcaggatttttccaacggacctggacggttacggggctgagccgcaggggacgggagggagtccatttcaaaattttttccttggcgtcgtaccgggcgtttaccaggccgaagccggagacgcgcatttccatttgcctgggatccagggagggttcccctgtcagggaaatggatatatcgggagtctggttttttaccacggtattggcagccggataaacgggctgggccggggccgggtaggaattcagctttttcccgctgctgttgccaggggtggccgccggagtttccggagtggagggaacgttgaaattcagggctctggtaaatgtcttagggtctttgccgaagaccatgtagcggtgaatccgccagcggtccgtgtccttggtcacttttttggggattaccgtaaaggccgcctggaatccggcttcttccgccttggagatcatttccggcaggatgaagccgcccggatagcaataggcctccacggaagaaccggggaatttttcctgaaggattttccgggaattgcctatttccgccgttgccagctccagaaccgcttgtgtacctttccgctgggcagccctccaggatcttgggtacaggtggctgacggagtggctgcccagggtggcgccgctattcagcatttcctgaatctgggcggggctcatggctgaaccgcggcccgtgatgaatttggtgtatgggaaaatggtaaaggggaaccctgtttctttcaggatgggataggcgtccgtgtagacgctcttccagccgtcgtcgatggtgatcatgacgcatttggccggaagctgcctgtcccccagtttccattccaggaattccttcatggagatgacgggcactccggacgccttcagcgcctgcatctgggagcggaatacatccgtattcatgcgcatttccgtagcgggaagggtgcggctgaaatcatggtagcccagaatggctacgcgggtttcatgctgaggaaccggaacgggggaaaaagccgtggagggaatggcaaggggtgcctccgcaggttgtgccggggcatgcaggttcgtttctccgggaatgggttccgcgttagggatggactccgccaggggagcggaagagcctgtctctccgggaatgggttccgccatggggatgtattcatccttgcggttggcttcaatcaggtctttgacgggaacgatgccggcggccgggtctcccttgatggttcccccgatgaccgggccgggagtcaagggaaggggagatgccggcggcaggtcgggcggaagctccgcacatgcgacaccggctgcgatcaagaaaacggaaaggaggcctgggacggagcgcatatctgcaactactatttttaagttttctgttcaatcttaaactcaggcaggcatgacagcctgttccgtgccgcgcgcgttttttccggggcatgtctggattttcccgtttgaatgcgttatcactaaaaagcatgcagactcattttccgctcgcggaagaaaggagaggcgtttagtctgtctgcagacatgagctgtatttgtcatttcttcaaagttctggcgcgccgtgcaggtctgctcactgccgtagctgccgccgtttttttcctgggggctcccgccggtgaagcttcggcccgcacggcggctcccgcttatccggccgcggaagtggggggggaatcccagtacagccattttcccattcctctcaatcagtacaatccggtgccgccggatgccagcctgtaccaggtgcttagtgaacgcaacaaacagtccggcggtttcaacctggcagtgacgctcgttttcttcggcgctattatccatacgtttctggccggccgctttgagcgttattcccataagctggccctgcgctacaaggaaaagctcaaggaaaccaacttccgcgtgatgcatccggaagagcgcctcccggtttccttcgcgtccgccattttccattttctgggagaagtggaagccgtgttcggaatctggcttatccctttcatgttcgtgtgctggaagtattattcctttgaggatttttccgcctatttgaattatgactgttccttcacggagccgatgttcgtgatgattatcatgattatcgcttcttcccgccctattttcaagctggcggaatatgtcgtgaactgcggcgccaggcttgggaaggccacgccgggcgcgtggtggatttccgtgatgtgtctggctcccctgctgggttctctgattacggaacccgccgccatgacgatcggagccctgatcctaagcaagaaattttacgacctcaagccgaagaaaaccttgatgtacgccactctggggcttctcttcgtgaatatctccatcgggggcaccctgacgcactttgcagctccgcccgtagtgatggtggcggaaaagtgggactgggggctggctcacatgatccagcatttcggatggaaggccgtttccgccatcgtcatttccaatttggcgtattttttccttttccgcagggagttcgcccgcctggcttcccagcagagggagttcgacgagtttgacgacgccgttccccagtcctgggaagaccgcaatgacaagataccgttgtgggtgaccctggcgcatgtctgcttcctggtctggacggttctttttgcccatgagccggtcatgttcatcggcagtttcctgttctttatcggtttcacactggctacgccgcaataccagaaccaaatgtctctgcgtgtgcccatcatggtggggttcttcctggcggggctggtcattctgggcggcgtgcaggcctggtggctggagccggtgctgacgcggctgggggactacgccatggtcggggctacgctgctgacggcatttaatgacaatgccgccgtcactttcctggcgtctacggttcccaacctgccggaagccgtcaaatattccgtggtggcgggtgctgtgacgggcggcggcctgacggtcatcgccaacgcccccaatccggccgggcaggccattctgggtaaatatttcaaaggcatcaatcccctgtggctgtttgcctgggcggcttttcccactgccatcgtgtttattttcttcacctgcttcggccattaatggccggagcgtgctatcattcttatgtttaccggactcgttgaaacaacaggaactgtggaagggtttacgcctattaacggcggagccaggctgacgctgaccattccgttcggccgtgaactttccctgggggattccgttgccgtcaacggatgctgcctgacggtggatgccctggagggtgaacgcatctcctttgatctgctttcccagactctccgcgtcaccagtctgggaaccctcaagccggggatgctggttaatctggaacgcgccatgtccgccatggaccgtttcggaggccacttcgtgatggggcatgtggaccataccggtacgattgccgctctggagcctgtagggcaggaccaccgtttggaggtgcgcattccggaggaactcacccgctattgtattgacaagggttccatcaccattgacggcatttccctgaccatagccaatttgagcggctctctgctggagttctggattactccccatactttcggccgcacgaatctgcagaatgccgttcccggccagcctgtcaatctggaagtggatatgctggccaagtatgtagagagactgttttctgcccgtgaacaacgtgcggagggatagtcctgcccgtaaggagaatcacatgccgggcatgcgggctggtttttcctgccggacaatgaaagtgcattcccgttttctgcagcaggggtgccgggatgcggagatttttgaacaggaaaccgggtattgctgttccgatgaaggcagggccgtgagggcggaacaaaaatgcggagcgggtttatttgctaccgggctattcctccctttgccgtaatccatttcccgcgtttgacgacccgttcaaagaacagaccgtgacgttccgctgccattttcgtttcttcccactgggaagccagaatgccggagatgaccaaagcggcatccttcttcatggcggcgatgatttgtggaaaagccttttgcagtatggttgaaaacaggttggcgacgacaaggtcaccctgctgggattccgaaggcttccattcgaagacgtcttccacaaataagtccagctgttccgccgtaacggcgttgcggaccatgttgtgccgagccacttcaatggccatggggtcaaaatcgaaagccgtggcgtgctccgcccccagcttaagcgccgccatagccagcacggcggttccgcagcctatgtccgtcatgctccatgatgtttttctgcgggatttggcagcgtcgcagatgaaacgcagacaggtggatgtggtagcgtggtctcctgttccgaaagccatttcggcggggacgctcaggatgcagcgcgaggggaactgtttccgcagggcggccagattctccgtagaactctgctccgtaatgaccagtgcgtcccttattttgagcggagggcgtttttcccgcttctgggtcgctacccagtcctgcgtcttgatttccctgacagttcctccaaaatattttttcaaggccagggcgtcttcttcatcatcgcagtaaacggtgattcgaaccgttttcccccctttgatttttgtaataacggcgttcggatttccggcgatgcgttcgctccaggcgtcttcccatttggcggcggaaagtttgttccaactccatgtcatgcagaaagtatgggatttttccggcagggaggcaagaatggattgattgtaactgcattccctctgtttttggggctgtggggctctattgttgaaaatttgatttattcaaagaagaatataaaacatcaactatcaaaccattttattttcagtatggttgcgaatttggaatccggagtaaagattatttttttatattcaatggccaacctgtaagaagaggaaggaaccttgttctattccaatctttttttctaacaataattcattgattgttattttgttgttttgatgttcgaataacaacggattccaaattcgtacattaaaaggagtgcttttgatatgcaaaaacatccaaatgtacagattatcatgaaattatttactcttgtcatgttgtccttggttccttcggttactgtctgttccggtttttccaaggaagttggtatttattcaggaacatatggaaacgatgatgtggaagtattcctgccggaggaagtgacgtatcatctgaccgggggggatggcgtcttttatgaaggtgcgtttacgtttgacaattataatccggacaaggggggcgccggaaacaggcagggcgttttctccggctatagtacacatttttccagcacggaaggaacgtctctcggctttcactgcaccgggcttaatcccggaaagaacagttctgcttccaaatcttttatttttgtcatggggccatgggaaagcggggaggagtttgtcgctcctcaggttacttttcaggatttgggcgatttgagcttcattgcggataatatggacatgatcggcattactgatggcgccacggccggaaccggtggcggaaggtatgggaaagctgattttgtttctttcaacaatgtaggaaatatcgaattccgggggctgaatcatgggggtataggcttcagccgtttgaattccttggcttttaccaataccggggatatttcttttacggatatgaagatgggatattcttcccatggaggcgccatttttattaaccaggggggggattcttccctttactccaaacctggagatgggaatatttcttttgaccatacgggaaatattatcttcaggaatcttgttaaaacttcttattacataagttctgcggggatttttaccaatgaagggagtatttcatttaatgatacggaaaatatcctgtttgagaataacacgtccaccggaggacctgcggcgataggcatcggatccatattcttaccggataaccagccgtctttgtcgtttagcaacatccggggagatattatttttagaaataataaagcttccggagggagcatgccggggatggcaggcgctatcactatttatggatcttttaagctggtgcaaacgggtgatgtcctgtttgaaaataatgtgactgataaaaatacggccggagccatttattgcggcaataatgaaaggaaaagaattggagggcaatggcttttgtctgcggatggcgggaatatcgttttccgaggcaacctggttaaaggaagttcgggggtctttgcccgcgccctgggtatttttgcttatgctcccgaaaacgattatacgggcatgtctcagcccaatgggaatttaaccatggatttccgcgcccaggccggacgagaaattgtattttatgatggtattgatattgaaagtattactgtagccatgcctaccctgcatattaacagaattccgtccgattgggcagattatggaggtattcctgtggagtttggaggaaccgtgcgtttttccggtgcattgacggagtcgtttctagttcgcaatgacggggaaagtgatggtgattacgcggaacgggtggaggcctcccgcagggtgaaacttgaatcaaatattattgtggaaggggggcggctggttcttgaatacggcatgaacctggcgaatgagagtggggaggtatggcagggaagttcaagagtggagcaggacaaaccggtgtttaacctggccggcggagtgctggaaataacgtccggttcatccatcagcgcccagcaggtgactgtttccggccatggcagcggcgctatcctgcgggtgggagccgctcccatcggttccgacagttgggaggggaagacctatgaactgccttccctttccgctgtcaccattgacatgtcccacgggtttgactgggatctcatgcctttctcggaacggggggacagcggtatcaacatcaacgcctccggggaatttttactgggggggaccattggaattgcggatacgctggatgattacgcctctgccgcctggggaagggacagggagtttgtcatttttaatatggattcttccagcaaacgtccgcaaggagagatgaaaggggttatttccaatacgacccagtcatccacggttgattcgccctatacctacggcggtacctgggaatatgaatggcgcgacatggatggagatggagaagatgaccagctgttggcaatttggaaacatgaagccggatgccgcccggatcaggtccgtccggagcaggctggagaacttgcgctcaattccctttggagttccgcgtcaaacgcggcttctcttgggaatactgcgttggcgcagttaaccccggtgcggttgaatcagcggtatgcacgcaatgtatggggaatggggctgggggatttcgcctgccagcgttcccggggcggcgtagatggttatgactatgacgggggcggatattccgttggcatggattccgattttggaggaaagagcgggatatgggggatagcgttcggacaaatgcacggtttcagcaagagccgggatttcaatgggaggattacccaggattctctaatgggaagcatttattgggggcggatattccgctccggagagcgttccctgtggacggtgaaagccgatcttacttggggaatgactgataactgcatggaaagccggttcagcaacggtatggacgctcatggggaatggaacaacagaacgtggctggtccagacggaagtttccagaagcattcagtatgcaggaggatggactgtgtctccgtttttgaggatggagtttacacatggcacggaagcttcttttcttgaagacggcagctatgccagaaaatttgaaggagcggttttgcgccggttgtccatcccggcaggtgtgagtgttgagagaagtggtgactggaaaggcaggccctggacgcaggtgctccgcctttcctatgtgggagatgctattcaggatgtgccggaggcttccgtttacagcatatacagcgacattttctggaaggcccgtggtgtcaaaccagcccgccatgccgtacgtgtggagtatgatgccgccttgcagtggaatgaccgctggacggtttatgccggttatggcatggaagcccggggaagctccgtgtaccaccgcgtaaatgcaggcgtatccatggcgttttaggaaacgtcagcacggatagaaaaaagggcacgtttccttcgaaagcgtgccctttttgatactacgggggatgttccggcaaggggaacggctacaatgttttgccgttcggccacgtcagcatccgtttcaggaagcgttcattgttgacggtgatcttcgggaagagacgtttgctggattccttgagcgccctgatggcgtcttcaccctgcagcggcgtgcggccggattcgtcgatgacggtgcgcagccatgcggtttgcggcatgccgcatgcttccacggccttgaagggcatgcgttccctccagttggtccctcccgtagtgccgggaatattgagccgtttgttgatgtcgaagagagcaggccagagaatggccgcataacgggaacgggaacggaacagggcgttgtacatggccgtcttgatttcctggttccagtaggaaagacaggtttcaggctgcatgccggagaaatccgcaaaccatttcagcaggcgcgctccgtcctccgcctggcgcacgatattttcctgttccgggttggacggcgttttgggtgagccgttctcccacaggcccagcttgtgggcgcgttcgattttcgcgtagctgtcgttccatgtctgcatgatggtttcgaaatcatgcgttccgaacgccgcaaaggagcattcgtgatactcttttccggacgtaatggttccgtccgacttgatttcccagtggggaatcttgaaaccggggatatccagctggcgcatgttcgggcgcacgtagtccggaacgcagcccaggtcttcccccaccacgctgacgccgggagcggcggaaagcagaaggcgcaggtacaggtccccatccgccaggttcatgttgcggtccgcagcattgtcatccccgcgcggcttgaagccgggcagccttccgcccgttctctgggccgcctgatcggtggaaagcggcaggaataccccgttttccgtgggtttccacgggaaggagtaaatgcggtaaaagcccaggatgtggtcgatcctgtacattctgaaaatcttggtgcagtattttacccggcggcgccaccaggcgaagttgtcctgcgccatgacatcccatctatacagcggaatgccccagttttgcccccatttgaccgtgaatgggtcttccgcatagctgccttccgccggggctcctccgcaccattccgtgtcaaacaggtggcgctcaaaaaagacgtcggcgctggaaagggaaacgccaatggggatatcccccatcagcttcacattgcgttcgtccgcataaatacggatgaattcccactgtttttcacagagccactggagccagcgggcaaaatccttttcctcttcgtaatcggaggcaatggccttggcccgcgccggatcctgttccggccagtgccaccagatttccgtaccgaacaggtcgcagagaatctggaaacagacaaagtcttccagccagcttccctgttctttcacccattccctgaatttgggcataatgcactcatattccggcttggttttgaaattgttccaggctccccgcagaatccacattttccagaatctgaccttggggtagtccaccagatccgggccggagggctgttcccacggcagcgtgtcccccgtttcattgaatacgcgttcttccaggccgggtatggtccagggttccagggaaaggtacaggggttccaaagctacggagctgatggcggaatagggggaggggcattcgtccctgcccagggcattgacggggagcagctggaggaaccccacatgggcatccgccgcccagtcaatccattggcgcaaggccgtcaggtccccgattccgtggtcattgttacggcgcagggagaacaatggcagaactacgccggctaatcttttctcatccatatcagaacgtattacttgagcggttcccccggatggacctgcgtcagccgttggaacagtaagctccagaatagcatttccggcaggaaggcggcaagcttaatacgttgtctccgcgccatgctttgcggtttttcctgggaagtggagcagggggacggtaagacaggctgttttttcccgccgcaggaatagacgccttaccgggaatccgattatttgtccgggatgcagttcggaagcggcatggttttctctgcgggaaacagcatgaaccggagggaaaggcggaatttttcttttagaaacagtctctggcggaaacaggcgcaaattctgcttccatccgtaatccgcggcaattaagatagccggcaaatgaaattgctttttctcccttccgctctgctggtgctgctggcctcctgcgggccgaacaagcatgtgaattcatgggaccgccagagttcggcattggatcccgtgggaatcacttccaagaaaatggcggccaaaaacagggcggagcaggcattttacaagcctggggaagccgttacgttcaagaaggacagaatgatggtgttcgagcagaatccggaaaataatttttccacgagcggaaccgtcaggggtggggtgaaaaccgggaaggtgctggtctgcggggatttgttcgccaaagtcgagtttgaagacggcagccagggctacgtgagcctctcagagattgttaatccacaggaaatgatgggtttttatcctgtttccgcctccgatatgattgggccggacggggctttgcttcctttgccctcgaacatgggcgccgtcagtccggaagccgctgccgcttcccgtgaactggatatatcccggatgaatacctctctggttcctgttccgagttccgtttctccgtcgggtgctgcgcctcaggaggctcctctagaaaacgttcccctgcctgaatccagcgtgaagcagtagggcctttgcagaaaatccggaaagtcgggcggaaaacaggaggcaatatacgtcggcctgcgcttcgcctgtatttttgttcccgggttctttccgacaggaacggaagcaattttattccgccgtcaattcatacgcaacggcatccgttacggtgacagtagcgaattgcccgacgggcagcgtcagaggaacggaaacggtcccgtcaatgtccggagcatcccattccgttctggcgactccgggagcatccaccagcacgcgtatttgcctgccgatttgctcctggcccgtttccgaagcgagacgcgccagcaacagggtggcttcattgtagcggcgagccttggtgcggtggtgcacctgattgggcatcttgtaggcttttgtcccttcctcccgtgagaaggtgaaaatgccggcgcgttcaaaacggaattcctcgataaactccatcagttcctgatggtcgtcttccgtttctccggggaatccggtgatgaaggtggtgcggatggcgatgcccggaacggccttccggatattccggagcaacgtgcggatatagtctccgtccgttacgcgctgcatggcgtccagcatattatcggaaatatgctggaggggaatgtctacatagcgggccactttggggcattccgcgatggctgcggtcagttcgtcgctccagtgggcggggtgggtgtagagcagcctgatccagaattctccctcaatggcgttcagagcgcggagcagggaagccagggattctccgcgggaggaatccaccgcgctgcggcggtttgggcgcgcatccgtccatttatccatgccgtaataggtgatgtcctgcgcgatgaggcagatttccttcacgccggaccggataagggtttccgcttcacgcactacgtcctgctgggaacggctgcggtggcgtccgcggatcatgggaatgatgcagtaggcgcagccgtggttgcagccttccgctatcttgatgtaggccgtgtgcggcggggtaaggcggtagcgcggtgtgttccagtcaggaacgtacctgcattttccttcaatgaagttccggttctgtatggtccggtccatcacttgagtgataatttccggcagtttggtgatttggtccggaccgataaaggcgtccacctccggaagcagggcgggcagttccttccggaagcgctgggacaggcagcccgccacgatgagtttctggttttccggataagccccgttttcccgggcacgcacgatgtccagaatggcatcgatggcttcctgcttggcctggtcaatgaaagcgcaggtattgaccaccattacgtccgcgagttccggttccggagtcatggtcatgccggctttttgcaggtggccgatcatgatttcagagtcaaccagattcttggggcagcccagggaaatgagtccaacggtgagaggcatggcagtagataagaagcgtgatggcgtcaatccccggagggggagtcgtccttgacgacgacgaggtcgaatggccggatgtccacgacgcgcacaggggtacccttaatcagtatgccttgtcgagagaaaacctcgcatatttcgccatgaatcatggcttttccattgggttttagctccgtgacggcgttcccgcggtctcctacctgaacgcgcgcgatattgaccgcttccccggcggaacctccgctgaccgtggcgttggtaacgcggcgcatcaggatggaatccgggaggtatttcatcagcagggcaatcagaagggagcctccggtcaggcccagggccagtttcaggagggggatgcccaggactgccgccagcgtgttgacgtcatcccactgtccgtcccggatgatatggtcccattcccaggagctgaccatgccgccgaacagggccagaaagatgcagacgccgcccgcaatggccgcaatgaatgtgcccgggataacgaaaaattccacgcaaagaaggactatgcccagaacgagcagggccgccgtctcatagccggccagattcccggcaatgttgttgccgaagaagaacagggcaaacgcggcaatggccacaatgccgccgatgccgaatcccggcgttttaaattccatgtaaatgccgccgatgcccagcaggatcaggatgggggaagcccatgcaatccagaggccgatgcgctcaaaggccgtaggttccgccgtgactacgggggcatttactttctcctgggccagcaggtccgtgacggaggaggctgtgccctgggccagcaggggcctgccgtcttccagacgcgcggcggcttccttgcccgtcagggtcaggagcgcgcctttttccagtttgacggggccgaactgctgttcctggtcggacgggatcatcatggcttttaccacttccgggcggtaacccttttccgtcacgacggagcgggtaaaggcccagaaggcgctttccgctttcttgcgcatgacgggatccatttcctctccggatgaggtgatgatgcccgctgcgccgatggaggagacgggagccatgtagattttgtcgcacgccgcggagatgagcgccccggcggacatggccctggggtttacgtaggcgtaggtgggaatggtgagcggctggatgcttttcatcatcatctcgctggtctcccaggccaggccgccgggcgtgttcaaatcgaatattaccgcgcgcgcctgctcctcctgcgctcttttcaggatgcggttcatgaagccgaagctttgtttgctggtcagggagtcctcccctacggggatgacgactaccctgtcgcggaaggtttcctccgcggccgcccggaagggggcgccggcaaacagggccagcaaagccagcaacagaaggtgaatgcgcttcatgcggacaggctagcatgttccgctcccgcgctcaatggggaaatgtgttcctccggggcgggaagccgccggtgctgcgccgtcttttccctgcctgtggaggccttgtttcctcgcatggcgttccgattctgtcttcttgtgcacccgtaccccttgtgatagactggttccgccttatgggaaggattgatgaagacagtatccggcgcgttctggaggccactgacattgtagatgtggtgggggcctatcttcccctgaaaagggccggttcccggtggaaggcatgctgcccgttccacaatgaaaagacgccttcctttattgtggaccagagtcggcagaattttaaatgctttggctgcggggaaggagggtctgccatcacttttgtgatgaagatggagaacctgggatttgcggataccgtgcgaaggctggcggaaaaagccggaatctccattgtggaagaggtttatgacgcggcggaagaaaagcggcgtaaggcacgcacggcgttgctggtggcccacaagaaggcagctgggtttttccacaggctcctgctttgttccccgaaggcggcggaggccagggcttacctgaattcccgcggatacggggcggacatggcgaaacgctggcaggtagggtgggctcctggctcctcgcgggagtttctggcctgggcccgcagggaggggattccggaccaggtgctgatagattccggtctcgccaaccgcggagaacggggagatttgtacgcccgcttccgggacaggctgatgttccccatcaacaatgtgtacggagaatgtgtggcgttttccggccgcattctgcggcctcaggaaaacgcaggcaagtacgttaattccccggagacggccattttcaaaaagggggacgtgatgtttgccctggacaaggcgcgcggctctatgggaaaaagcggcaaagccctgttgtgcgaggggcagattgacgtcattgcctgccacgaggcgggtatttcttttgccgtagcccctttggggacggcgtttactccggagcatgcccggattctttcacgctatgcttcacggatagtgttgtgttttgacgcggacaaggcaggcatggctgcggcggaccggactttccgtgaactggccccctttggcaaggatatttacctggtgaaccttcctgccggggacgatccggattctttcatgaagagggaggggaaagaggctttttctgggatggtggagcgggcccgttccttctttgaggttcgcattgaacgggccagggagagcggtttgttggatgatgccgcttccagcgccgcttttgcccgtgagatgacggccctgctggcctgcatgagcgatccggtggcccgggatctggctacgactgacatagccacgcgcatgcgcatggctgcggataatttgcgcggcgctgtcagaatggccggacgccggaaggggcaggaacaggcccagtccgcagagcgtaaggcggctgcggaagttccgcagcatcctcctgtgaaaatggatcgcgccgtggccgtgctctgtgaactggcccttcagaattcccgtgcccaggggcttatcgtggaccgcattgaagaattgctggagccgatgcggctgctgcagggtggaggcatcttaaaaaaaattctggccaggctgccttctccggacaaccccgcggccgttcaggcttttctggcgtccctgcctcagccggaacgggatgccctgggcatgctgaatctggagcccatacctattcccaatgtggacaggagcgtacaggaagcctgctccggcattgcgaaggccgctttggagaggcacatcgcctccctgatggcggaactggcggatccatccacggatgctgccagaaggctggaattgtccaaacttagtgttgacttgaagcgtttgctgggtacaatgtagtgcctcgatacctccgggtattgatataatggtgaattgtgccctcttcttttcaagatatgtccaaatccggtgacccatccccctcttctcccaagaagacttccgccaacaaaaaagcttctgaatccaaggaaaaaataacggcccggcccgccgcaaaaaattccaaaaccgctccgaaggcggctccagccaaaaaaaactccgccagggttgccgctccggctacggaaaaggccgccgccaaacccgttgcggaaaaaaaggccccggcaaaaaaagcgtctccggcttctgcctccaagaaggcggcgccggccgccaaaaagactccggcaaaggcgcctgaagctgttcctgccaagaaagctccagccaaggctgcggagaagaagccggctgagaagaaggctgccaaacctgctgcgaaggaggaaacgcccaaaaagttaagcgaaatattggaagaggaacgcaagagggctgccagccgcaaggtcacgaatccgattgacgctccggagattcaggaaaaaatccgtgaacttatcaagctcgccaaggaacaggggtatctgacttttgacgatattaatgactcccttcccaacgacattgtcgatcagcaggattacgaggccatcatggaccgcctgcgcagcatggcgtttgacatcattgacgcgtctgatgtggacagctacacggaccgcacccgcatcagcacggaagaagaggacgaagaggaaaagctcgaagccaagatggacattctggatgatcccgtccgcatgtacctgaaacaaatgggccaggtttccctgcttacccgtgaagaggaagtggccatttccaagagaattgaggacgcggaacagaacgtccagcgctgtgtgcaccgcttcggtttcatcgcgaatgcctatctggacgtagcctatcgcctgctcgacaatgaggaacgctttgaccgcgttatccttgacaaaaagatagactcccgtgagcgctatatgaaagggctggcccagctctgcgcccagatacagcagacccatcaggacgcatccggttccttccgcaagctgtaccgcagcaaggaggcggccaagtccgtcaaggcccgccaggccgaattcgacaaagttgccggcgttttggtgaagttcttcggtcgcctgtatttcaagcacaaggtgattgaggatttctgttccatgattgacgaggcccgcgaccgcgtgctccgcatgcagaagaaggttgccctggatccggacaacaaggaactcaaggaacatctggcagagctggagcttcgcatgtggatgactgcggatgagatgggagaagcctaccaggaactccgcaaatggcttcgcgaagcccgcagggccaaggatgaaatggtagaggccaacctgcgcctggtcatttccattgccaaaaaatataccaaccgcggcctctccttcctggatctgattcaggaaggcaacatgggcttgatgaaggcggtggaaaaatttgaataccgccgcggctacaaattctccacctatgccacctggtggatccgccaggccatcacccgctccattgcagaccaggcccgcaccatccgcattcccgtgcacatgattgaaaccatcaacaaattgatgcgcgtgcaaaagcagctggtgcaggagtacggtagggaacccactccggaagaaatcgcggaagaaatccatctgcctgtggaacgcgtgcgttccgttttgaaaatggcccagcagcccatttccctgcaagcccccgtgggggattccgacgatacctccttcggtgactttattgaagacaaggcggcggaaaatcccatggaggaagcctccttctctttcctgaaagaaaaaatcaaggatgttctggacaccctcacggaccgtgaacgcgaagttattgaacagcgcttcggcctccgggacggcagtccccgcactctggaggaagtgggccgccagttcagcgtcacccgcgaacgcattcgccagattgaagccaaagccctccgcaagctgcgccatcccacgcgcatcagcaagatcaagggattcctggaaatgacggaatcctgaccggatttgcgccgcatgccgtgctacgcttcgtggtcatgaagacttgcgtagctgcggtatgcggcatgttcatgttactggtttcctgttccggcagcagggaattcaaaccggcgttcaatcagccccttcagcccgtgatgcagccgggctttgtgtatgtggaccaggtggcacccctggtaaagactaatttgaaatatgccggatatgacaattttgtagggcgtccgctggacggttaccacggtcggcgcgccatcctgcgcacccaggcggcgcaggcgttgaaaaaagtctcggaagatttgtatcgtcagggttacctgctggaaatttatgacgcctaccgtccccataccgccgtgctggacatttgcaaatggggagctgacgaaggggaccagaagatgaagtcccggtattatccccatattgacaaggccaaggtgttcggagaccactatgtgcgcgatttctcggaacattcccggggcgtggctgtggatgtttccctgctgtacgccaggaccggaaagccggtggatatgggcggccatcatgacctgctggatcccagttccgccacggactccacattagtgactccgtcccaacgcagaaacaggatgattttgaaaaaggcttttgaaaaacagggttttgccaattatgctccggaatggtggcattaccgcctgttgaatgagcctgaacctaccctgcattattactttcccgcgtgggacggcatgacttccgcaggcaggccataaaagaattttacatatcaaatttttgtaaaaatttgtttgttagttgagtggccgaccccgtgctgattcctatcaagcagaatgtagaagatcgtactgacacctggaaaagatacattagagtagaaaaagcagaacggcattatttccgcatcgacggagacgatgttctgactctctaatggtgtgagccatctatgcggaagccgatacgaagggtgccgagatgagggcgattgcattggtgatgttgaatcgtctcggcaacacgaaagggaatgcctatcgaaatccattgttgagtatgttgacggaatttggagaaatcaaagacggtaagaatcctaattgggcatctgtaacaaatcagcaatatgccaaggttgaaggggagaagtacagggatattgacaggctgagttgtgaaaaaccggaagaagccagaaaggcgcttcttgaggttctgagcggtggcgtaaccgttccttatgatggatttagaacggcaggcactactcccaagcctcatgttactattggaggaactgactttttgactgaaaaacagtaccggacctgcaccgtcaaaccagacggatgggataatttgtctgtctggcccggtggccctttggatagataaatcattctgaagcatcatcaggcggatcaggtgattgagacttgagccgtctttttgatgaagtaatatccggaagatgaatgcctccttgaaaacgttttttttctcttgctgcacggttccccttgttgtggcttctggtgcgccttctcctcttgtcgatcatcctccggtagatggcgccgccttgcgttttcacaagcaggagatggcttttctggaaaactgtttccgggacaatccggataacaaagtaatctggcaggcggaccatgaagccgctttagtgtggagaacgcctaggggcgccaatttcaacagttatgaatttaaagcttttctgcgccagcaggacggttcatttagagaaataggaagatattctgttatgtccggttatggatattgggatgaaaaaaatatccggttttccaatgaaggttttaagattattttaattgcggatggaggggcaacccgtgcaagccatcagttccattattcccaacctgccgctacctttgttttccggttgggccgggaagagggcaaatgttccagcgaggacgtgaggatgaataatgattgttaatttccaaaccggtttgtccgcaatataggagagggaaagcgcagtttggacaattcctggctattccttgacgaagagtttttttgttgcgggcgtcttggccgtccgtattgggagaccgtgaatacggatttttaattaaaaggccgttccgcggaaacggcggaacggcctgaaaagcgtttatgcgcaggagatgttaatgaggcaggcggaagttgcggttaaacgcggaaacttcttccttaagctgggagaagccgtccggattcgggcatacctggtcacctacgtacaaggccagcgcacgggcaatgaattcggccacctgttccacgtctttttctttcatgccgcgagtggttacggcaggcgtgccgatgcggatgccggagggtttcatgggagagcccgtgtcaaacgggatggcgttcttgtttacggtgatgcctacgcggtccagggcttcctgcgcgtctgcgccgttaatgcccttgttgcggaggtctaccatgaagacgtggttgtccgtaccgttggagacgacgcggaagccgagttctgccattttggccgccatggccttggcgtttttgacaacctgggccgcatagtccttgaattcgggcttcagagcttccccgaaacaggccgccttagcggcaatgatgtgcatgaggggacctccctgcattccggggaagacggcggcatccagttttttggcgtattcctccttgcagatgacgaagccgccgcgggggccgcgcagggatttatgcgtggtggaggagacgaagtccgcatagggaaccggattcgggtgctgcccccctgccaccaggcccgcgatgtgggccatgtccacgaacaggtaggcaccgcaggccctggcaatctgtcccatgcgttcaaagtcgattgtgcgtgagtaggcgcttgctcccgccgtgatcatttgcggctttacctccagagccagtttttccaaagcatcatagtcaatagcttccgtttcctgggatacgccgtagtgaaccacattgtacagtttgccggagaagttggcccggtgaccgtgggtgaggtggccgccgtgggagagatccatcgtgagaatggtgtcgcccggcttcagaacagagaagtaaacggccatgttggcctgggaaccggagtggggctgcacattggcatgatccccgccgaaaatttccagtacgcggtcaatggcgatctgttccactttgtccaccacctcgcagccgccataccagcgtttgccgggatagccttccgcgtatttgttggtcagcagggagccctgggcttcccggacggagggggaagtgaagttttcagaggcaatcagttcaatgttgttgctttcccggcgtccttcttcctgaatgagggccgccagttccggatccgtccattgcagggggctgccggaggatttgacgacgcggcgttcatggcgcccgccttcaaagtcagcatgcagccaggcgtccaggacatcttccacactttcattgtccacataggcggaagccaggcagagcaggttggaatcattgtgctggcgggagagggccgcagcaggggccgtgcggcagagggcggcgcggacgcctacccagcggttggcggcaatgctcatgccgatgccggaccggcagataaggatgccgcggtcgttggtgccgtcagcaatgctgcttgcgactgcattggcatagtcggaataatcacaggaatttttggtcatggttcccatgtcggtcacttcatgaccccatgccttgaggagttctgctacggtttccttgagatcgactccggcgtgatccgcgccgatggcaattttgtatgtcgtattcatggtggtgctcattgctgacgggcaaaaatactgccttatttccctccggctggcaagccccggattcatttcgggctgttcgggaggcacggctcccggaattgcctccgtgaaaaagaaccccggtcccctgaatggggccggggcggcaaggaggttcgcgaggagcgagccgttattttccggaggattccagcttcagcatatcctggacgatgttgatgccttcacggagttccggatcaaggccggaggggtattccggggagtcgtccagttctgccgtggggtcttccgccaggtgcatgaattgttcattgtctttttccggatccgccaggggcagctccttggcgttgacgtcgtccagcgtcaggcggtaaattttgtatttggtagcgtcttccttggccatttccgcgaagcggattttgcgttccttgttgatggatttgcggcgttcttccagggcggagttttcctgttcccggattttcttgttcagggaaagcttgttgtccttgatgcgctgtttcatcatggcgatatcttccctggcaatctggagatcgcggtctttttccacgcgcttcgcgctggcatctttcagcacgggcagcatggccgcgatggaggagtcctttttgtagttggtgcagggcgtaatctggtcatagggcatcgcgtagtccagaatgtcttctcccagctcgaatgccgccgtagcggtgggaagctggatatcgctttccacgcctttgagctgggtggagccgcccgccacacggtaaaatttctgggtagtgactttcagcaggcccgcacggtctctggccgcgaagaaaggcaggtattggccgatgtccacaggctgctgcacagaccccttcccgaaggtggattcatcccccacaatcacggcgcggccgtaatcctgaagggccgcggccagaatttcagaggcggatgcgctgagtttattaatgagcaccacaatggggccattgaagagtttctggcggttgtgagcggatttgatatccacgttgccgcgggtgtccttgatttgcaccacggggccgtttccggtaaagaagcccgtcatcaggcgcacttcctccagggaaccgccgccgttgctgcgcaggtcaattaccaggccatccacattttccttgttcatccgttccaggatttttttgacatccttggcacagcggcggtctccgccttccatgtctgcgtagaaggagggaaggctcagcacgccaatgcggttcctgccttccggagctccggtaagttcaatgatttcacctttggcaagttcatccttcagaggtaccttggagcgggtcagcgtaatgattttggcctgtccgggggcgtctgccggctctactttcaggcgcatctgggtattttcggctccgcggatcatatccaccactttgtccagcttcatgaacaggatatccaccatttctccggagttgtcggagtcaatggcaacgatgcggtcgttcagcttcaattctccggatttgtcagccggtcctcccacaacgataccggtaattttggtggaaccgtcgtcttcactgcccaacagggcgccgatgccggtgagttccgtacccatggagattttgaaacggtccacctggcgcgcacccatgtaatccgtatgcgggtcatacgtcaaggctacggcgctgagcagtgtttccgctacgtcttccagatccgtttcctgaatattgcgctgaatgcgttcataacgcataagcagtttttcctccgctggtttctcattggccaggggatcgggcttgttctgttccttggccaggcgcgctacggtttcacggcgcaggatttcggacaggagctgttcctccaccatgtctttccagacctgctgcatttccgcctcatccttgggccacgcggctgttttgcggcgggaacgttcgatagacttgtctttgtcaaaggtgaagcctccctttttcagcaaatcccgcgcataggagatgcgctgcatggcgcgctggcggtaaagggagtgcatggcctgggccgcatccatcatctggccggacataaggtagtcgtccagctccttaccgtattttcttttgagggcgtctacgtcctgctgggtgaagaatattttgttggggtctaccttgcgcaggtaggtttccaggaatttggcggatagttcatcgctgaattctttgcgggagaagtggaaattctggagcagcagggacatttgcttgcccacctggttgaagtccgtagccgcagaggcgcaggaagtaatggcggctgcggctagggccgagaatgcggtgagtctaatccaacggaatgagtgcatgttcataacggaaaagggtgcgtttttttccatttggggaaaaagctgacgccgggatgtaagtgttactgatttgcaggtgattgtctatcttataaaacgtccacatgacgctattttgctctccttgtttccggaagaggacaagagtaaatggaagccggttcatccggaaatatccggcggcggcagggggaggaaagaagagaattcatgggtggataaatccaccataaagtttgaaattttgtgcggaagtccggcatttgtcatattggagctgcatggaaatggatttcattttacggatgttttttccgctttttgttgttgcgtgctttctttggttttccgttgctgcatccttcccggagagggaaaagtggcgggatgactgctttcctgtttgcagcggagagggtgaggatggggagaacggacgttttccgaagagacgccgcaggaaaggaagcatttcaggattgaggttgcaacggttttctgtacacttcgcgtgatgatgagcataccgaatcgggacaagagtttttccggaagcaagatgggtgttctggtgcagcgttcattcagcaccgtggttttgcttgggttgctggccggggctttgtggtgggactgcgaacttgggtattacggtctggtctgcattttctgtattttggccgcttgggaatggcggcacatgctgctgcgttccggaaaagcctcccagccgaacttgagctttcttttcggagtggcgtaccccgtattgctgtcctggtcatgctgcatcactaaattccgggaaagcgcccttgcggaacaggtttctttcctcatcccccttcctcttctggtggcgcttgccgctccggtcctcctggtagtggttgccttcatccgtgagatgaagtacccggtggatggaagcagggctctccgttccgtgggtactacgctgctttcctttatttatcccgtctggctgttctcttttgccattctggccctgcatctggcgtatatgagggcggggtatgtttatccggccattgtcatgtgtgtgctgtgggtcgttctggtaacgaagatggcggacatttttgcctacgtgagcgggttcctgctgggcggccgccttttttcccgcaggctcattccccacatcagccccaagaaaacgtgggagggcctcctcggttcctgggtgctgacgaatgcggcggccatagggctggttttcccgatgttcggaatttccgtcttgtccataacccaggtattggtactgatgggatgcacatccctcattttcctgctttccgtttacggggatctggccgggtccctggttaaacgcagcctggccatcaaggattccggttccctgctgccggggataggaggaatttttgatttgattgacagcccttcctttaccgtgccgtttttctggtttctgctggcctgcatcggctgaatgtccccggcacgaacggattccctgtaacccgttatggttttttcttctcttcccattgaggaaatccgcggagaattgatggaggctctgcgggttccttctccgcgcattttgttgaaagctcctaccggctccggcaagtccaccggcgttcctccgatgatggatgacgccggtctgggagaccgtggcctgattgtcgttgtacagccccggcggatggccgctcgcctgctggcgcggcatgtggcccggctgcgcggggtggagctgggaaaagaagtggggtatgcggtgcgttttgaacggtacatttcctcccgcacccgtatcgcgtacgtgacggacggcatgttggagcgctggctgacggaacggccctccctggaaggggtgagcgccgtggtgtttgatgagttccatgaacgcagcctttccggggatttatccctggggcgtgtgctggatctgcaggaagggccgcgccgggatctggccgtggtcgtgatgtccgccacactggagatatcagggctgcgggaatatatgggaggttcctgccgggttctggaagcgcaaggcaggcagtatcccgtggaagtcgtttaccgggctccccgcttggtcagtgacggacgcggcagggtggctcctccccccatatgggagcaggcggcggatgttgtgcgggaggcggtgagggaggatgactgcggggatgtgctggtatttatgccgggcgtgtatgagatacggaaaacggtggagttgctggcaggaaagccgtggatgagcggccgggacgtttttcccctttacgggtctctggcgccggagcagcagaattgcgccgtggagcgggggggtatcccccgtgtcattgtttccactaatgtggcggaaacttccctgacgattgagggagtgcgtacggtggttgattccgggctggtccgccggtccggatgggatccgtaccgggggatggatacgctgcatctggtgaagatttccaaggcgtccgccgctcagcgcgcgggccgtgccgggcgcgtggctccggggcgctgtttccggctgtggagtgaggcggaacaggcccggaaggaggattttgacccgcccgaatgtttccgggtggatctggccggagccgttttgaatttggctgcctggggcgtcaccgtaccggaaaatttccgttggctggatgttcctgcccccctggtgatgcagcgggccgtgaatttgttggctgccctgggtgcgacggaagaggatggaagcctgacggatacgggaaaaaggatgaccgcttttcccctgccgccccggctggcccgtctgatggtggccggccaagatgaacagtgtgccgtggagctggccgccgttgcagccctgatgcagggagaaggtgttgcggtaaagggggggctgaacgatcatttgcgcgattctgcggattacacggatttccaggcggagtggcgcgcggtggagaaggctgtggatgccggttttggggcggcggcgtgtacccgctggggcatctcttcccgcggggcgcgggaggcatggatggcataccggcagcttctgtccgtcggcagccggggaaaagcccgggaaacgccgggaccggattttacggcggcgcgccctgccgtagtccgtgcaatgattgagagttttgcggaccatgtgggtgtgcgaaatggcgtggcagccaatacatgccgcatggccggcggggtgggcggcaggctggcggaaggaagcgtggtgtttcaaggagagcatttcgtagccgcagaggtggcggaattgtccggaaaggcggtggaaacccgtgtgggacgctgtacgcttattgcgccggaagatttgcgttccatttggccggagcgtttttcctgcggggaggaagccgtcttcgatgccgctttgcggcgcgtgcgtctgcaccggaagctgatgtatggagatctggtgctggaggatcgtgaccgcggggatgcccctacggagctggccgccccggttttggctgaaaaagtagtggacggaaccctgaagctggtgaaatggaatgatgccgtggaacagtggatacgccgtcttaatggtttgagcgtttggatgccggaactggggctgccccggttttcggaggaggacaagctggtcgccatttctctggtctgtgaaggggccgtgggttataaggacatcaaggaaagggaaattattcccgtgctgagggattggctttccggctggcaggcgaaggcgctggacgattatgccccggtaagcctcacgttgcccaacggccagcacgccaaggtcaggtacggggaggattcctccccggtgatcagtctgacggtgcagcgcctgttcggcgtggcggtttccccacgcattgccaacggggccgtacccgtgattgtggaggtgctggcccccagccagaggccgtggcaggtaacgggatctctggaaagtttttggcggaacggatacgggcaaatgaaaaaggacctggcggggcgttatccccggcaccgttggcccgaccccggggaactggatttccttccccgttcccggtgataaggagaaaggatttttctgtaacaaaacagtagcaaaatcgaccgtttccgtgtaaagaggcggtggtgcagctcgcggatgccctccgcccaccattcacaagagacagttatggactcaatttactggattatcatcacagccctgctgcttctggcggcatttgacttgatcaacggcgtagcgaatgacgccgtcaacttcctcaattccgccatcggttccaaggctgcacccgtgcgggtgatcctgaccgtagcttccatcggcgtgctggtgggggcctgtttctccggaggcatgatggaagtagcccgcaacggtatttttcacccggacatgttcagttatcatgaagtgatgctgcttttcctgggggtaatgatcagcgaagtgattctgctggataccttcaatactttcggattgcctacgtccaccaccgtttctctggtattcggtattttggggtctgccgtagcgacggccctgttcaagatttccaagctccgcctggttcagtccgtgtgggatttcattaatacggacaaggcttttgagattgtcaccagcattcttctttccgtagccatcgcctttacggtgggcaccatcgtcatgtggatttcccgtctggcgttcacgtttaaataccagtcccggttcaaatggttcggctgcttctggtgcggcattgccatgacggcgatagcctattttgccgttttcaagggcttgaaggagtctaccctgatggagccctcgttcatccaatacattgaccagaatctgggcatggccctgctcacggccttcggcggtttttccgtgctcatgttcctgcttcagcatttgttcatgacgaatattctgcgcctgaccgttctggcgggcactttttccctggctctggcctttgcgggcaacgacctggtgaatttcatcggcgttttcatgggtggtctggattctttccagtacgccagcggcgtggcggcggccggtggctctcccgcatccatcacctccatggagtgtctgatgccggggcagggcatgccggtaaaccattatattttgttcgccgcgggctgcatgatgatttttgccttgtggttctccaaaaaggcaaaaacggtgatcgccaccggcgtggaactttccaggcagggtgaaggcggtattgagcgtttcggctccgtcccccccgcccgcgccatcgttcgcagcgccatcgccctgggacgcggggtgaaaaggcttattcccgcccgcatgctggtgcgcatgaaccaccagtgggatcccgccccccagcccttgaatcccaaggaccgggtggcatttgacctgattcgcgccacggtgaacctgacggttgcttccctgttgattgcatgggctactggcaggcagctccctctttccaccacgtacgtgacgttcatggtggcgatgggctcctccctggcggacaaggcatggggaagggagagcgcggtttaccgtgtaaccggcgtgctgacggtgatttccggctggttcatgaccgggctggctgcctttacgctggccgccgtcatggctaccatcctgcattacggacaggtgtacgccatcttcggtctgctggccctggtggttgtcattctggtaaagtccaccatcatgcaccgcaagcgggaaagcaagctttccgtagagcgttttgaccagattacggaagaaaatatcctggatgtatgcagccaccagattgtggacagcacgctcaagctgcgggaaatttacaatgacaccgtggaaaactttttccagggggacaggaaggccctgaaagaactggcggatgccgcagaacggctggccatgaccagcagcgaacatcacaagtacgatattctccctattctgtacaagatgcagtcccgctccctggatatgggctaccactttgtgcaggccctggagcatttgaatgaagctacgcagagcctgtcgcagttttccgagtccatcttcacgtatgtggataataaccacacgccgtttacgattgaccaggtggacgatttgaaggaggtacataccgccctcatcaagctgctggatgaatattgcaaaatgctccagacggggacgtacattcagttcgactatacgatggtggcccaggaacagcttcttcaactggtggcaaaagccaccaagcgccagatcaagcgggcccagcgcaaccagacgcgcacccgttcctccctgctttatctgaacatgcttaatgaaatgaggtttatggccgtgcaggtgcgggccctgaccaatgatgaacgaaactttgtagcggcctgaagcggcggttctctgtttttttcacgtaaggaaaaaaattcttgagcgtttaattcgtgaaggtatcctgaatgaacagggatgttcgataagggaggaacgagagcttcccttgtcaccaggaataaccctgatttcataggtagttagttggagcggctacgggagaaattccgtagccgcttttttgtcttcccgggccttgtgtcatacaaaagaaataatgtttgaacatatttgccgtgtgtttgtctcacccataacggttatgatccggatgcagtgaaagagagagcgcttcatccacttaaggactcaaccgtcttcataggtagttagttgaacagcagccccggcgaagggattcgccggggtttgttcatttccggaagatgtattccgcgctgtaaacagctggaagggaggggaaaagaaaaaataggctgcgttttgccacggggtttgattgacgtgtgggacgcgtcagggcatagtggcagggtatgaagagagcgttttgcgtgatagccggtgcatgcagcctgcttggatgggctccggcggacgagacgggcatgaacaatgtgctggaggattggcggatgaggcagttcgactgggaatccgcattgaaaacggctgaaagcggggaaaaaagggcggaattaatgaaaaaccgtccggatgccgttccggtggctcgggaattatggaggctggtagggcgcgaccttcagaaacccgagactcaaaaatcctgccttcttccggctgtcgtctggtttctggatcatcccctggctgtagcgcaggcgttccccaatggagacatggccaggaaaattgtcgtgttctgcctggattccctggaaaatacgctgtttcgggaacagggggcgggaaaggcggcgtatgccctgagcaattcccgagacctgcgctgccgcgttattctggaacagatcaagaattacaaccagttccctgaggaccagggcctggcttccctgggcctggccatggtgatgaaggaaacgacagggatgcttcaggatgacgtcaggctggtggcggcccgcggaaaattgctgaaagacgccattatcaaatgctatgattccagtttcggccctattccggttcaaaatattgtgaaggaggaactgtatgaaatacgcaatctcaatatcgggcagaccgggcctgaaatcagccttccctctaccgcggcggccggaaaagtgacgctcccctccgggaataagcccgtgctggtggttttttgggatccgcaggatatgcgttccgttcagtttttgcaaaaggccgcgtctctccgaaaagaatttcccggtttgacggtgatgccggtggctcccggaaagagagagaacatagaaaaggccctgttgaacttgaaaatggatatgccctccctggtggatgaaaaagcggcggcgtttaaggattaccgggtgaggctcaccccgcgggtgtatctgctggaccctgcggggaaaatcctgatgcgcggcacgccggatatgctgtttgacgccaacctgtacgcggtcatgggcaaacttgagggaaaaaagaaagaaaagccggatgggaaaaagtctccctcctcccctgcttcctccaagcctgtttctccgccttccaggattaattccccggatacgcgcgttccctctgtttcccggcctgataggccgcggcccgcgttcccttccgccccctccggtgcggaggaccattctcttgccgctcctcctttgaggcccatgcctgaatgatccgtttcatggaggggattctgttgagaaaggccgcggagaacgtggcccgggttctttccggagcaggacacaccgtatattttgtgggcggctgtgttcgggacagattgctgggatattccgtgaaggatatcgatattgctacctccgcccgtccggatgaggtgttgcgcctgtttccggatgcctgggaagtgggcgccgccttcggcgtggtgctggtacgccgcgaaggtttttcctttgaggtggcgaccttccgcagagacggaagctacagggatggccggaggccggaggccgtctgcttcacggatgcggaagaagatgcccggcggcgtgattttaccatgaacggcctctttgaagatccgttttcttcgcctccgggccgtgtggtggattatgtaggcggagtggaggatatccgggcccgcgtattgaggtgcatcggggagccggaccgtcgttttgaagaagattccctgcggctgatgcgcgccgtacgttttgccgttaccagggaagttcaggtggagacggagacttgctcctccattttcaggaacgctccgctgctggcccggatttccccggaacgcatccgggaggaactggacaggattttattgtctcccggaaggaaacggggtgtggaaatgctggtggaaacggggttgatgaagcatgtcattccggaaatatacgatatgataggctgtacgcaacctccccaatggcatccggaaggagacgtatacacccatacgctgatgatgctggatgcgctgggaagggacggctcccccgtgtctttggagctggccctgggggttctgctgcatgacatcgggaaacctccctgccgtcaggtggatgaaacggggcgcatccgtttttccggtcatgacaaggaaggctcttccatggccagggtcattttaagaaggctgaaatattccaatgccgtggtggatgcggtgtgttccatggtggagcgccatatgcgcttcatcaacgtgaggcagatgaggaaatctacgctgcgaatgttcatgaacgctcctcatttccgggatgaactggaactccaccgcctggattgcctttcctccaacggactgatggacaactggcaatttgtcagggacttcatggattcctaccggaatgcccctctggtgcctcctcctctggtgaccgggcgtgatctggtgaatctggggctgtccccggggcctgatttcgggaaatggctgtcccgtctgcaggagcttcagttggagggaacgctccggaccagggaggaagccctgctgcagctgggacaaattgccccggtggaacagaatgcgcttgcagaatacctgaaaaagttagcattataagcgtcaaaatttgattatttcaactcatgcgtcctgtcatttatcaactatttgttcgtcatttttccaatatggagacccatggagttgactgggggagccgggaaacgaacgggtgcggaacttttaatggagtgacggataaagccttacgtgaaatagcacggatgggtttcacacacatctggctgaccggggtgctgaggcacgctacgcagacgtcccatcccgggctagccgcccagccgaaatccatcgtaaaaggcctggcaggaagtccctatgccgtggtggattattttgacgtggatccggacctggcctcctccccggagaagagaatggatgagttcaaggctctggtaaagcgttgccggacggtggggctgctgccgatgatggattttattcccaaccatgtttcccgagcctacctggcggactgggacgggcatgacgattttggagaaggagatgatccccatacgtttttttctccggagcaggggtacttttacctgacctccaacagccctggggacggtccacccctgcgtctgccggacggcctgtttgaaggggaaatgacgttcggacgtgtgacgggcaacaatgccgttacatggaatcccggcaagtacgactggtatgaaacggtcaagctcaactacggctataactttatggccggtcttcctgccctccgcctgttgccggggtggaccagccccaagcagcatgtgcccaagacatggcgcatcatggacgatatcctttccttctggcaaagcctgggcatcggcggtttcaggtgcgacatggcccaaatgatccccatggctttctggaaatgggccatttcccgttcccgggtgcgtctgccggacgtgtttttcatggcggaggcatacaacgaccacatgaaaaccacacccggcgatccgtgcgccgcccttctggatgccggatttaatgccgtttacgattccgactgctatcatctggcgctccatatgtacacggaaaataactgggccaatgacttcgaccggcttttccgaagcaatcccatatacatgacccacggcgtccgctacgtggaaaaccatgatgaaactcgcgtgtgctcccctctttcctggggcggcgtgggacgcgttgttctgccggcggtcatgacgctggtgtatgcctccgggagcggtcccgtgctggtgtacaacgggcaggaagtgggggaacgggcggaggggcccggcggtttcggcggacatgacggacgtaccagtatttttgactatacctgcctcccccggctccagccctgggtggcgaatggccggtttgactcttccctgctgccggaagagtccgcagaactgagaaattttcatcggaagcttcttcctctgatgcagcatccggcgctggaccggggagatttttacggactgaactgggctaatatgaaaaacaccactttcggcagggaaccggcggaagacacttccggccactgggtatatgccatgctccggcatgatgcccgcgccagggccaccgtgcttgtggtggggaacctttctccaaatatcaatttctacaacctgcgcatttccattccccagcacgctttcggctggtgcggcatccagacggatcgggtacgcgtcagaaacctgatggacgccgaggatgaggagaggatttttgagcggcgggaattgatggactacggtctgtcccatcccctgaaaccgggacatgtgggcgtgctggaactgtctgccgtttaaagaaacgttccctccggagggaagctgcagcctttgccgatattttttactctgctgggcgtttttatgatgacgggcggtttttaattcggtatagtcccggaaattcctatgactagacgtttccctcactccatgtctgccattcagcaaattgccatggcgcttgccgttgccggtattggagccggccaggggctggcccaggagggggcaggggccgcacgccgggcagcagcccggatggaagagcaggctcaggcttccatgctgctgttggggcaggcgcgtcagcaatattccgagggcaagtaccaggaagctctggacaattaccgcagaagcctgactgcgctgcccaaatcccccaacatggagaagcgccgccgtttcctggaaaccagcatcgcggatgccagcgtggccgtggcccaggaatatatcaaggcggggcgttatgatgaggccgtcaagttgctggaagatgccctgaaatccactccggaccatgccctggccaggcgcacgttggaaatagcccgcgacccggtgcgtacgaatccggcattgtctccggaacacgtaaaaaatgtagaggaagtcagccgtctgcttcacctggctttcggctattatgaactgggccagtatgatgcggccctgaaggaatttacgtccgtccttaagacggacccttacaatacggcggcgcggcgcggcatggaactggttaaccgcgccagaaccgcctattttagcgctgccagggatgaaacccgcagcagtgccctggcggatgtttccagacagtgggagatgcccgttcctttgacggaaacaccggaagaacccgcttcattttcccgtcccctggataacccggtggtgaatgtggaccagaaactgggcatgatccgtctgccccgtgtgcagctggatggagcgacggtgcaggaagccgtggactatctgcgcagccaggccaggacgcatgatgccacggccatgactgcggcggaacgcggcgtgaatatttccgtggatcccggtcctgcagacagcgtttccgccagggacgccgccgccaagagaattacgcttaatcttcagaatgtacctcttcgtgaggccctggaatacgtggcgcgcgcatccggccttattctgcggacaaatgcctttggtgcggaactggtatccagttcagacggaacttcctacatggtcaccaagtccattacccttccgccgggcttcttttccggattgtcggaggactctggcgccgaaaattcagaccccttcagttccggtgattccggttcttccggcatgaccctgaaacgggtggatccgcaaaaggcgctggcttccatgggggtgaaattcccggaaggcagtttcattaaatacaactcgggcaactccactcttcttttccatggcacgcccagagatttgagcatgctggaggagctggtagcggccaggactgcggaacagcccctccaggtggtggtcagcgcgacctttctggaagtcaatcagacggacttggaggaattgggctttaactggatcgtcaatctgaacctggaccctaccaagtggttcatgggcggcgcgggaaccgataaaaatgactataacaattccgtgctggacagcgccgccaatgtagccggggccgtcgctcccgcaggagtggtgggcggcctgcgttccggcaaccaggtttttacggaagatagcattgacagcatgatagaacgcggcacttccgccagaagttctgatgcgacctatgttcccggcggcgctcccagcatcgtcactctgcgcggcatgtggagtcacgcggatatcacgatgattatgcgcggcctgagccagaaaaaaggcacagacattatgcagcatccttccgtgattgtgcgccccggtgaaaaagccacctttttcagcggcagggaactgatttaccctacggaatatgatccgcctgaagttcccaacagcacgggcaataataatgactggggcgacaatgacaataacggcgacggtattccggtcatgcccatgactcccgcccatcccactgcctttgaaaccaggcagctcggcacgatcttcaatgtggaagtgaccggcatcagcgatgacaaatccatcgtggaaatgaccgtagtgccggaaatcgtggattttgacggtttcatcaattacggtacgtcgcttttcgttcccatggtctcccaggaaaaggacgcaaaggaagaagtcgtcatggtgaaaacttcagacaacttcatccttcagcccgtgttttccacgcggcgcctgaccgctccggtgcgcatagccaccggcaatacgctcgtcatcggcgccttgaaaaaatccacttccattacgtatgaggataaaattcccgttctgggggatattccctgggtggggcgccttttccgttccaaggggtccaaggaacagcgcaaggccatcatcatcatggtaaaggcggaagtggtggatccgggcggcaagaagctttatacgccggatacttccattccggacgaggaggtcccggcaggggacgcttctctccccgccctcagcaatgcccagtaacctttaaccggatcaagaccattgaaaaacagcggttccgattttgagtcttctccttcccagggggctgataatatcatgcgtcagctgcatgcgtcggattcccacggagtagaacggagaagggaagtagtagtgcgcccgaacggcagcaaggtgatccgggtggaaaagcgccggcggacttacagtgacgaccagcgggacgccaaacaggccatgttgaaaaacaagcgttttttaataggcctttgcattctggttctgctggctgccggtgcgctggcggggacgtatatgtaccgccttacttctttcaatacggaggaatttgccggccgcctgcaagctgatctttccgccgcctggggcggagatgtgaaaatttccggaatggcggtggatggccttaccatgaaggcttcacgcatcagggtatcctttccggaagattcctgcctgtcctttgtggcgatggaaggcatctccggggaaatttccgccgtgcccttattcatggggaaaatcaagggggaaagccttaatgtgtccagggcggtagtcggtttgcggcccggattcgttaaatttgccgtaccgcagacgaaacgggaattgccgttcgttttccggcgatacacagcgccgcgtctggaagtggggtatgcccatgggacggaagaatttactctggagaggaatggcgctcccttttatatgacagcggaagcctacatccgcacgtccgggaacggacctgaaccggaatacgtgctggatctgtcacagcaaaaattgaaaatcaagggctggccgctgatgggggttgattccggttccgtcattctaaacgggagcggtgtcaagcagcttactttttccggttttctggacaaagggcgcctgctcaataagcctacggatctcagccccttcatgattacggggaatttccttctgggtacggatttccgtcaccaggcgtggacgttgacaggaaaaaatttcgatctcgcttccctgctgggagatgatttctcttcccttcttaaggtgcagacgggagaacaggaaggggatgaaaagcatgaattgaagctggattttgctttgcctgtaacaactgaacagaagaggccctccctaaaaggatacagcggttccgttatcaaggcgaccatgatcaggctgcctgttttgcgcctgctggcggccatgactgcccggaatacagaaataaggctgccgtactcttctcccgtctttacgtccggttctttcctgctggaaagcgatggaacggaccgttccgcctccctgaaggaaatttccctgtttgagcagggctttctgggagtgaccgggggggtgtacagcaacggtacttccttgacggggaagctggtttttaaaattccttcctacatggtggacagccggaaactgccttccggcgtgacgcaggaagggcatgaaattattcttcctgtgaaaatttccggtactccggagtctccacaggacaactctgccggaatgttccaggaagaggcgccgcgcacgggccgcccggaaatgcataccgctccttcccgtggaatagctcttccagctccgtcaaattcctctccttcccgtattacggtagacggattcatgtgatattgccaggactccatgctgctgctcaatcctattgttcggaaaacatctgaaaagcgttcccgctggtggaccaggctggccggatttggcctgtggtccgtactccagcccatttgcatgagcctgaatatccgttccatcaaggaggagcatgatgatgtttatacggcgccttttctggtagccctttggcacaatcgcacgatggtgccgggttatgcgtggtccctggcccagaagccgctcaagatgagtgtgcttaccagcgccagcaaggacggcgccctggtggaggccgtatgcaggcattttggcctgggtgccgtccggggatcttccggacggcggggggctctggcctacatggaaatgatgcgaaaggtccaggaaggggacgtctgcttctgttttactccggatggtccgcgaggccctatttacgaagtgcaccacggtattgtcaagctggcctcccagtcagggctgcccatcgttcccgtatgcatcgaatatgaaagctgctggcgtttgaacaagacctgggaccgctatgccattcccaaaccgtgttccaacgtaaatattctatggaaaaagcgcctgttcattcctccggacgcaacggatgaacagatggcggattatgcccgtcttctggccgggctgcttggcgaggggcttccggacttcccgcctcttaaccaatcattattatgcaaatcatcgatggaaaacaggtagcttcccaggtgctggaagaggttgaaagggatattgctaggctcagggaacagggaataacgcccggcttggccgtggttctggtaggggaagatcccgcttcccaggtatatgtaaattccaaggtgaaaaagtgtgcggagctggggatgaattcccgtaaaatagttctcccttccgacgcctcccaggaagaactgctccaggttgtccgtgaattgaatgtggatcctgccgtccacggcatactggtgcaaagcccgcctcctccccatatcgacgaggcggccgtggtcctggaaatagaccctgccaaggatgtggacggcttccatccggagaatgtcgccaagctggtgctggaagatgagaccggttttgtgccctgtacccctctgggctgtatgaggctgttaaaggccgccggcattgaaacggcgggagcgaatgccgtggtcattggccgcagcatgattgtgggcaaaccgatggcgcatcttttgatgtccaaacagtcaaacgctaccgtaaccgtggctcattcccgtacgaaaaacctgccggaactttgccgttccgctgatatcatcgtggcagccataggccggcccgcttttgtgacggctgattttgtaaaagacggcgccgtagtggtggatgtgggcatcaaccgcgtggaagatgcctccgccaagcgcggctacaggattgtgggggacgtagcctatgacgaggtggctcccaagtgccgggccattactcccgtgcctggcggcgtggggccgatgactatcgccatgttgatggctaatacggtcaaagcgtgccgccagcagacgggagcctgacgaaaatgccgtgacgtccgtttttcttgtcaaatgaaagaaagtaaggcagtattcagttaccattatgtcaagtaaattactcgaaggcaaagttggtgtcgtagtcggcgtagcgaacaagcgcagcatcgcgttcgcaattgccaaggcgtggcatgaagcgggcgcaaagctcatcttcaattatcagggagaacgtctcaaggacggagttctcaagctgatccatgagaacttcggagaggatgttcccgtttatgatctggatgtcagcagtgatgaatctgttaacgctttctttgaaagggttcgccaacatacggataaagtagattgtctgctgcattccgtggcttttgccccgaaggaggctcttggcggcagtttcctggaaacgggccgcgaggcgttcaagatttccctggatatctccgcttattccctggtagctctttcccgcgccgtggaacccatgatgtccgacaacggcagcattttggcgatgtcctatctgggatccgaaaaagtggttcctaactacaatctgatgggagtttccaaagctgccctggaagcctgcacccgttatctggcttatgatttgggccgttcccgcggtatccgtgtcaattgcatcagtgcaggccccatgcagacgcttgctgctcgcggcgtttccggttttaacaccatgttcaaggtgtatgaggagcatgcccctctgggccgttcctgcacgggtgaggaattgggagccaccggcgtttttctggccagtgacggcgcagccgcaatcaccgggcaggtgatttacgtggacggcggttatcagattatgggaatgtaacgcattccctgcggaagctttcttcctgttcacaagccgtaccggtttttccggtacggcttgtttacggtttcatggagaaggtaaggggggctgggggattcctggcttctgtcaaaaaggccctgttttcccgctgcgtttcagggaacgaacactttcagcgaaccggggcgggtgatgcggaccggagcgtttcctgcataatcgccgtccagttcgcaggcggcctgtccggcggaggtgacggttccccccgtcatccggatgtattcaaaactgccgctcctccgggaatgaaagcccccatgaactgcggccatcaggaattccccgatgatggaagtaatggaatgcctgaatactactgcgtccagaaggccgtcactgttgtccgcttcagcaaagaagttaagcgggccgccatacttgcgtccattgccgaagatgatggaacggccttccaatatccggccttcatctgtggtcagggtgaggcgcggctgtttttccgtacagacgcgggcgccggcaattacgtaggtaagggctttccatttttttttcatttcccatgtggtcagttctacagctcgggcatccgcgccaatgcccgccatttggagaaaaacttgcccgttgaatgcgaacaggtccacatttttggaacgccccgtgtttagaatgtgcaaggcgtggtcgaaatccgggcggattcctatttcccgtgaaaaaacattcatggtacccgcagggaagggggccagcaccgtttccgtattgcagagagcccttgccgcgattcccagcgttccgtctccccccgccacagccacggcaggcgctccggaattagcctgagaaaccaaatggttcaacatgtcttccctgctttccggttcaatgacgtcaaaaaaatcccggtgccgatccagccagcggcggaatcgtccggctctggcgctgcgcgccgtgttgttgaaaaacaggggaattttcatggagcggacacgaagaagttcaaaatctgaaccggggcttccgtgtgtgccacaggttcatggcgcacggttccgtcaggcagcttgaattccagcatgccgcgggaaatattgtccggcaggagtacctcaagaaacttcctcatgtcgtcggacggtccgggtgtaatgccttccgccagaactttcccttcttccgatttgaggatgacgtgcaagggaagccttctggcaccgttttttctctcttccctgatgtccagcatcagccggctgccgggcacatattccggttgggccgccacccatttattcgccagtttcatgtagcggtccgtgatattgacggcggggacggtacggctttccggagggaaagccagcgcgtgccgtttttcgtcgtagcgggcttcccatatcataggaaagaaggctcctgaaggttcttttttccaggaggtggcataaatggcgttctccggtttgcggggatccagcatgctgatggcggacattacccacggggtgttgaagtccttttcattgtattccagcattttccattctccgtcacaccaggcttccacccagttgtggttgccgcgcacgtggttccaggtaagaacgcccgccatgcgggccggaatgcccacggagcgaagagcgcagattagaaggatgctttggcccgtacaggaaaccttgccggattgcagggattccttgactccctggtggggaactcttctctccgtggaatagcgtacattcagggttttctggatgtgggaggcgatggtgagggcggcttcccgccccgtcttgcatggggaaacaagcggtgagaagaggtgatggaactgctccctccattcgtctcgcggttcgttgactacggcataagggagcacattattttcataaagttcccacggaacctgggcagcccaggggaattggctccgtgcagccagggcgaggcggacttcccggaccagcctttcttgcgtaaccgttcccctgtcctgcgcgggcatgtgggcacgcagaaactccaccccgtcctgaatggtgtcatgggcggcgcaaatagcggcggtcaggcccgggagaagggcgaaaggcagcagattcatgaacgttgtaattcatacctgaattccgggagggagacaagcttcctcttgcgcaagaagggtatggaaatgggcaaagagatgcgtgtcttccggcggagtgggggcaaagggtgcgtcgttatccagaatatcctcgcaaatgcgcatgaaatcgcgggcggttttcgcccttttcatgtaatggtcaaaagtgtcgggaagtccccgcgcggtgtaaaccagatattttttcatgcggtggatgtgtttttcctccacataatgttcctgcatttcccgcgtgcgttcataaaggcggcgaatatagtgcagcacgttccggaaggtaaggtctgctgcaggatggccctgaaagcgggaatgaagctgtgaaaatatccagggattgcgcagggctgcccgcccaatcatcagcccagctggccgggccagccgcacccatgcctccgctgtggctgcatccacaatatttccgttggcgactactgggcatttcagcattcctgcggcccatttcacccattccgggtgtaccggggagcggtagccctcacggacggtgcgggcgtggatgcacaccctgtccggggaatgggaggcaattaccggaagaatccgttcaaactcgtccggcgtttcgtatcccaggcggcatttgacggtgaaggctccggggggcaatacgtcccgaagcgctcccagggccgcgtccatggccttcagggaccgcagcatgcctccgcccgcatttctccggcatacgatgggagcggggcagcccatgttcagatccacgcctgcacaggcgtgttccatcaggacctgcgcatcccttgccaggtattccggttcatggcccacgagctgtccgtaaatggggcggcctgtaggattttcatcaatggagcgcagaatgtatggcgacatctttttatgatgggccaccgtccggaaatactccgtgatgaaataatccggcagggaattcaagtccttcaatgtgttgaggaaagccagatccgtcacatctttcatgggggccagggccaggagcatgggtctgtgcataccgtgaaaagctccggttggcaagctgtgattgtcttgacgaaagaaggaaagtgtggaagctgggagcatgaatcaggactcaacccgcaaagccagagtgaatgtgagacgggccgaagtaatggagcaggtggaaaaggaaatccagcagcattaccagagtgaattgatttcccacatccgttctgcgggcaatgtgtacaatctgggccatacggaattttttctcgcccgggagttcgggttctgcaacggcgtgcgccgtgctattgatatagcatatgcggcacgcagagtgtttcctgaccggcggatttttctgattggggacattattcacaatccggaagtgaaccggcagctggaggaaatgggcattcgaaaacttccctggaagcagttggattcctcctatgaccgggttgctccggacgatgtggtgattattcccgcgttcggtgttcctactcctttcatggatgcgctggaggagaagggcgtgcagattgtggatacgacatgcggagacgtgatgaaggtctggaaaagagtgaagaattacgccgccatggggattacctccattatccacggtaaggctacccatgaggaaaccagcgctacggcttcccgggctcttggggaacggggaagggggaaatacctggtggtttacgatttggaggatgcccgtatcctgtgcgactacatcatgggccgcggagaccgcgaggcattcctgaaacggtttgaaggatgctgttccccgggatttgatcccgaccgggatctggaggaggttggcatcgccaaccagaccaccatgttgaaaacggagacgcagacgctccagaagatggtgaaggatgccattgttcagagggacggggacgatgataatttttatgtgtttgacaccatttgcggtgctacccaggatcgccaggatgccctgtatgaactgctgaaaaatcctctggacgtcatgtttgtggtgggtggctacaacagttccaacacaacgcatctggtggatattgccagggagcatgtgcccacgtacttcattgagtccgcagaatgcatcaagtccatccagtatgtggatgcttttgatacgaagacgcgggaagtgcgccgcatgactacggaaccagtagtgcagaacctgggcaaatccctgaaggtgggaattacggcgggcgcctcatgtccggccaacctgattgaggccaccatcctccgcattgcggatctgcgcaagtagcaaaacgcctccggtttggtgaatgagaaaaaaagagttctctttcaacggcggcacggccgttttttccgtaacacggcgcagttgcctgggccgcggaagaaagcatagggaaaactgcgcgggagcgtttcctaaatttccaaatcttccggtgtaacggaacgttgttcccgggatgcaagcagtacggcttgttccacgacatattccgtattggagtcaaaacggtaggcgttgcagttgggacacactgccgtagtcagggatacgatggaaccgcaggcttcgcaaaccttgaagtccccgggacggtcaataatcagtttggctttatccaggcgggattgctgcatgggagtagaaaataaaacaagccgctcagcagaacagagcggcttgccataaagaatcgtcagaaaaccgaagtgaaaactcaggcgatttttgcgatggccttggcggccttgctcttgtagttggctgcacgattggcggggatggtgccaaccttggcggctttgtcaacggctgaggagaaagtgttgtaggcagcagcagcggcttccttgtcggacgtttccaccgcagcggcaactttcttgcggagggtcttcaacttggaggtcacggcgcggttgcgggcggtgcgggttgctgtctggcggatgcgcttgagtgcggatttggtattggccatgtttaaaaaaggttcggtttccgtttcgaggtggcaaaaacattagaataacaggacaaaatgtcaagctcttgatgtattttttaaggcattcctttcctgcacgggctgactgtgggctttaccggaaaaggagtttgtggcactatgttctcccgttatgaagaaacgcgtggatttgcctgaaaaaaaatatgaaggatatatttttgatttggacggcaccctggtggacagcatgccgctccattacagggcatggcgtgaagccctggctcgagcgggggctccggaccacgtgttccgggcggatgaattttattcctgcggcggaaaatccgccaatgatgtggtgcgttttttaaatgaacggtacggcatgcacatggatgcggcgtccacagctgcggacaagcgccgcatttatttggaaatgctggaaaaggaaggcatgcagcctatccgggaagtggtggaattcgtgcattccctgggagacgcccccaaggcgatagctaccgggagcgccatgccgggagcgtcccggactctggctgctgccggactttcaggcctttttgatgtgattttgacgccggatgaggtggagcatggcaaacctgctccggacatgtttttgaaggcggcggaactcctgggggtatccccggaccgttgcgtggtttttgaggatgccgaacccggcatgaaagctgccgcggccgcaggaatggactgcgtacaggtccggcggccatccctggcctgattcctctttccggatttggtacgaaaggggattccgggattttcctcctttctccatgcctttcttccttttaaggaaaaggcttcacattgcgcccggaatgcgttagaacctttttttctattgaacaaataaaatattatttgcacatgagcacaaacgacaaaacatcatccgccccgacgaaaacccgcatgacaggagctgaagtgctcgtggaatgcctcgtgcgtgaaggtgtagacgtcgtctttgcctatcctggcggcgccagcatgccgattcatcaggccctgagccatcagcccaagatacggaccatcctgccccgccatgaacagggcggggcattcggtgcggaaggctatggccgcgttacgggcaaggtgggcgtttgcatttccacttccggccccggcgccaccaacatgattacctccattgcggatgcttatctggactccacgcctctggtggcgattacggctcaggtcatgcgctccttgattggacgcggcgccttccaggaaacggacgtattcggcatgaccgcccctatcgtgaagcacagctatctggtgacggaaccggaagaactgccccgtatcatcaaggaagccttctacatcgcctctacgggccgtccgggtcctgtgttgattgacatgcccaaggacgtgcaggaggccgtgtttacaccggactttgacatggagatggatattcccggctacaaccccgtgttgcccgtccctgcggataagctggaagaactcatcccgttgattgaaaacgccaggcggcctgtcatttacgccggcggcggcatcatttctgcggaagcttccggggatcttctggaatttgcggaacgttcccagattcctgtggcgaccaccctgatgggcattggcgccatgccggaaacccaccctctttccctgcgttggctgggcatgcacggagccgtgtttgcgaataacgccgtgaatgaagcggatctggttattgccctgggcgcccggtttgacgaccgcgtgacaggctccgtcaatatgttctgtccggaatccacgatcgttcacattgacattgacgccagcgagatcaataaaaacaagaaggtggcgtatcccatccgcgcaaacgtgaaggacgccctccgggtactcaactccgctctggccgcaaaaggctgggagcgcaaatcctccggctacacccgcactcctgaatggttcggcgtgattgacggctggaaaaaacagtaccccttctcctatgaggaccgcaaggggtatatcgccccgcaggctgtcattgaagagctctaccgccagacggcggacaaggaccccatcatctgcacgggggtgggccagcatcagatgtttgccgctcaattcttcaaatttgacaagccccgccgtctggccacttccggcggtttgggaaccatgggctatggacttcccgcctccatgggagcgtgcctggcttatccggacagactggtcgtgaatattgacggggacggttccatgctcatgaatattcaggagctggcaaccattcatgtggagcgtctgcccgtcaaatgcattattctgaacaaccagcacctgggcatggtggtccaatgggaagatttgaagtatgattccaaccgggcccaaaccttcctggcggacccgcacgacaattatgatcctacccataaaacggaagatgtcatctacccgaactatccgcttatttgtgccggattcggcgtcaagtgcgagcgtgtgcttcgcatagaggagcttccggcggctatcacccggatgattgaatcccctgaggcctatgtcctggacgtcatggtcccccatgatgtgcatgtgctgccgatgattctggggggcatgagctacaaggatgtgattctggaacgtattgccggggatggttccgccaaaaaggcgtctgaactgggcaaggaaatcccgactgccctgtaagagcgaggcaagcttcttctattgagccttaaacaggagccgtccgtaagggcggctcctgttgcatggcggcgcaagaggaagacaggtcagttgactgccattagggtggcagcaaggcatgtatatagatccggatattcctgttttccggtaggtgaattcctggttttgtgaaggaatgaggaagatgtttctggacgcagtaaaaaagaacggttagcatcaatgagccaaattgagtgcaagctggctcggacgtgaagtaactgaggttttctaagatgatgccacatcggatgctgcgcttgcgccaacctcaagctcacagaaaattgccgggaatccggcgcatgctgtaagcgattgagaaatgtagcttgacagaaaaattccctttgatcaggcctggccgcatccggttcttgcatcaggttggcgcaagacctttgttgcatgtttgatactcaaaccgtattcgtcaggccgtcgcacccacacgggtgcgtgaattgaaacttcacaaaaaacccgataggagccgcaatcggatgtcgcacccacacgggtgcgtgaattgaaacccgttgcatggttgcaatgggatgacgcacaaggtcgcacccacacgggtgcgtgaattgaaacaacatttccggcggggctgacggtggaataggcagtcgcacccacacgggtgcgtgaattgaaactcttaattttgcgaaccagattcacagtcagtttgtcgcacccacacgggtgcgtgaattgaaacattttcggattgttgcttgtcatagttgtgcagggtcgcacccacacgggtgcgtgaattgaaacaaatgggagggggtactttataatgattggcagagtcgcacccacacgggtgcgtgaattgaaacctctgttatttaccctaccaggggcgttgagacagtcgcacccacacgggtgcgtgaattgaaactaaaaagatagtagcttgaggcagggcatttaccgtcgcacccacacgggtgcgtgaattgaaactccaacaaccctataacaatataaacatcatagagtcgcacccacacgggtgcgtgaattgaaaccaacaaaccgatacgtcccccaagttgtttcttagtcgcaccctcacgggtgcgtgaattgaagtttttatgtatgtttgacatatttaaatacgaatcgttgttttattaagggagggagatatattgaaataagggtatttgttgctgaagaatgaaagatggatttttgtgttttttgttgaatgcaatattttgacggaggaagttggtttttggctgatagaggagaaatgacgggaagtattattggacgaatatgaaaagatattgtctggtttccgggttatgtttgtgcctgttcatggggatattttcatgtattccggaagctccggagcataagacggaaaaagatgcctcagccattgttctggatgaggattcggatataatctggaggaatttttctttgggctgcgtttcattcgatgataaggctccgcatagtaaaggttcccgcatttttcaccgattgattccagatacggaggtttatatccgtcagttgtcccgtattgttctccatacgttgtatgagagtcctgaagaatgtattgttcctgtccaccatttgcgtttcatgctggaggataccgatggagttgcctgcaaatggggaggaaatggagaggttgccatttcctgcagcacgcgccatattgaggggttgtttaaagatgatgatgatgcgacgaaggtttattttgaaattcgaggagtcttgttgtatgagctaacccatgtttaccaacaggaaccccaggggataggttcctatggaacgaacagggaatttagagcatttatcgaggggatggctgacgccgttcgtatagctaacgggagattccatagaggagcttaccgtcctacaggcggcagttatatggatggctacctccatgcaggttatttttttgtgtggctgcgggattataaagaccctgaatttctacgcaaattgaaccgtagtgctcttgaggtcgttccatggtcgtttgatggcgccgttaaatatgccttgggcagcgagtatcatattgatgagttgtggcgggagtatcaaagggtaatggaagaggagaaataggggcgcttcatagttcaggagttttgatgggatatctagacaggaggctggaatagaaggaatggccgtggagagtgttcttaaggcgtgggtatttctcgtttaccatttttgaaaagcaaggtctgagtggcccggcagaaagacaggatgcctcatgcttcgcagtattggaatcctgggcgggacagggtgccttggacagagggatgggaaacggtgaggaggagcgaagcccccatgctgcatgctggaaacgggaggcagggatattctttcggctggacaaacggagggacggaagacattctaggcgttccatggagggcatacgctattacaaccgatatacgggcagggaggaacgggagcaggtaccgggggagaagtatatgcaatggatttacggcactgcttcggggaaggcggcactgcatgtcctgattaaacgcggcgttttttcccgtttgctgggttggttgaagaatcgcccttccagcgcccgctccattccctcctttgtggaggagtacggcattaatatggaagattctctcaagggagtgggggagttcaggcatttcaacgattttttctaccgccgcctgaaaccgggagctcgccctttggccggcggggaggatacggccgtttttcccgcggatgcccggcacatgggctgggaacgcgccgaccgaattaagaacgttttcgtgaaagggcagcgttttgacctgccttctcttctggggagcgacaccctggctgagcggtatgcggccggcgccgtcgtcttgtcgcgcctgtgccctacggattaccaccgttttcattttccggtgtccggggtgcccggcccctggacgaagctgggaggcccgctggcaagcgtgtctccgtattgcctgcgcggccgtctggcgtggttatggactaataaaaggaatttgaccctgatccggtcagagttgtggggagaggtcgccatgctggaggtgggagctaccggagttgggttgattgaagagacgtatgttccgggtgttttctccgcaagaggggcggagaaggggtattttgcctttggaggctccacggtaatgtgcttttttgaaccgggaagagtcagtttggcttccgatttgttggaaaagacggaagaaggcttggagctgtttgcccggcagggagacatgatgggcacggcagcgacatagcctccgggctggcgtgcctgtcccgcaatgttttgagtagggctctttcctgacggaatgccggggatggattccggcgtttcagggcggattttcggattttttgattttccgaagtgccaggcgggttatttcatttccgcaatggcgcgggccatatccggagccttgaaggtagaggagcctgccaccagcacatccgctccggccagagcgcattgagcggcattgttttggccaattcctccgtccatttgaatgaggaaggaggcgcggttttccgtgcgccattcggcggctttttccaccttgtccaatacggaaggcatgaaggactggccgccgaagccaggcactacggacatgaccagcagcaggtctatttccgccaggtaaggttctacggcttcaaaggatgtggccgggttgagagccaggccgttttttactccggcttcccggattcgcccgagtgtgttgcgaatgtagtaggagtctcccagttccacgtgaaagcagatgaggttcacacctgccctgacgaagcggtcaaagtagtggtccggccgttctatcatcaggtgggcatccagaaagcggtccggccccaccgcttttctgacggcggcgcagatttccgggccaaaggagatgttgtccacaaagtggccgtccatgatgtccagatgcagccagtcggcaccggagtcaaaggctcgccgcgcttcctccccaatgcgggagaaatcagcggccagcagggacggggagattatggtcatggctgagggaggcttttcgggatgtcagttggctacaatgttgacgaggcggccgggtacgacaattaccttgcgcacagtgacgccgtccaggaaggttttcaccttggcggaggccagggccagcttttccagttcttcccgggagatgtccttgggcacttccagcttgtctctcagcttgccgttcatctggatgaccatgggaacggtattttcctccagcagggcttcctcccattcaggccagcttttctggcaaagctgcgtctgggccagagccgggaaggctgtttgcaggcggctgtgtatttcttccgtaaggtggggggcaaagggattcagcagagtcaggaaagcatcatagtcctgaacgtccaccacatccgcggaggtcatggcattggtgcattccatcattttcgcgatggcggtgttgaaggacatgccattgatgtcctccgtcacttttttaatggttttgtgcaattccttgcgtacggcaagcaccccggcttccggagcgttctccaccagtttggagttgatttcccattctccttcctgattttcccggaaggccacgcgccagacgcgggccaggaagcgggaaatgccttccacacctttggttgcccagggtttcacgtccttgagagggcccatgaacatttcatataaccgcagggagtccgcgccatattcgcggacgatgtcgtccggattgacgacgttgccgcgggatttggacattttctggccgtcttcccccaggatgagcccctggttgacgagtttctggaagggttcattggtgctgaggtagcccaggtcaaagagtaccttgtgccagaagcgggcatagagaaggtggagcacggcgtgttccgtgccgcccacgtacaggtccacgcctccgggggagccggcggaacccatccagtattgttccgcttcccggctgacgaagcgttccgtgttggccggatccaggtaacgcaggtagtaccagcaggagccggcccattggggcatggtgtttgtttcccggtgggccgtgggcgtgtaggctatccattccgcagccttgaccagcgggccgcgggggtctcccgtgggggcgaagtcgtccagatccggctggagtacggggagttcgctttccggcagggcgcggtggtgaccgttttcccatacgatggggaatggttccccccagtaacgctggcgggagaagagccagtcgcgcagcttgtagtttactttgcggcgtcccttgccgttttcttccagccagaggatcattttttccttggcttccggagtaggcagcccggtcaggaagccggagttcacgctggaaccttcataaccgcagaagccgcgccagtccatgtcttcactgggcggctgaactacctggagaatgggcaggccgaagacctgggcaaaggcgaagtcgcgttcgtcatgggcggggacggccatgatggctccggttccgtagcccatcagcacatagtccgcgatccagacgggaatttgttttccattgaccggattgacggcataggctccggtgaagacccctgttttttccttggagaggtccgtgcgttccaggtcgcttttggaggcgcactgggcgcggtattgttccacagcatgtttctgttccggcgtggtgacggtatctaccagagggtgctccggggaaagaaccatgtaggtggctccgaagagggtgtccggcctggtggtgtaaacagtaatcgtttctccgtccagggtgaagtccacttccgcaccttccgatttgcctatccagttgcgctgaagcagtttaatggattccggccagtccaggggctccagctcgtcaatgaggcgttccgcgtagtccgtgatgcgcagcatccactggcgcagggggcggcgttccacgcggtgtcccttggatttccattcctccacttcctcattggcaaggacggttcccaggtccggggaccagttgacggcagcttccgctacgtaggccagccggcgctggtcgatttcttcccggctcaatccctgttcctccagttcggaaacggggcgcgcctttttcagttccttgttgtagtaggagttgtaaagctggaggaatatccactgggtccaacggacgtattcatggtccgttgttgctatttcccggtcccagtcgtaagagaaccccagcattttgagctggcggcggaagttgtctatattccggaaggtagtgacggaggggtgctgtccggttttaatggcgtattgttccgccggaaggccgaaggagtcccaccccatgggatggagcacgttgaagccgttcatgcgtttgaaacgcgctacaatgtccgtggcggtgtacccttccggatggcccacatgcaggcccgccccgctggggtaggggaacatgtccagcacgtagtatttgggtttggacgcatcaaagccctcttctccggggttgtttactttaaaggttttcctctcgtcccagatctgttgccatttaggttcaaaaacgtcaaagggatatggtttcttgcgctcggacatgacgggagggaatgtatactccgcccgcgggtcaatcaagcctaaaccaggcggaatgcaggcgcttccaatgctccgggggcatgatgccgtttttcggaaaaaaggggaaaggtaagaagacgtttgcgcgtatttcttaactgaaaggtttttgttgattgcgaccatgaagtttacttcctgtattatgtctgccgtctgcggagcattgttcctgtttgccggggcatccgctctgggcaatggttccaaccctgtttccggaaagaagcccaatatcatcgttttcctggtagatgacatgggatggcaggatacttcccacccgttctggtccgacagccagggcaacctgaagaaaacctttttgaacaggcgctaccggacgccgaatatggagaagctggcttcccagggcatgacgtttacggatgcatatgctcatcccctttgcactccttcccgggtgagcctgatgtccggcatgaatccggcgcggcaccgcgtgacctgctgggtacgggaacagaacgggacgacggacgccaacagcaggagcctcctgcctccggactgggcgttgaacggccttcagcctataggcactcccgccaggggaacgacaaaacgccccatttccggggaggatatgcgctatcacatgacgcgtccttttgccacggcggctacactgccagagatgctgaagaagtgcggttatgttaccgtccattgcgggaaggcccatttcggcacgcagggaactccgggttccaatccgttgaatatgggatttgattataatatcgtaggtacggagatcggccatccggcggattaccgcggttccaggcattacggaaaggggtttaaccatgtgcgcggactggatgagaataattattaccaggacgatgtatttttgacggaggccctgacgcgggaggccattaaacgcctggaagccatcaggaccaatcccagggaggctggcaagcccttttatctgtacatggcccattacgctttgcattctccgctggatgagcgcgcttacgacaagaggtttgcggatgcctacaaaaacccggaggacggccacaagtggtcccggacggagaagcattattccgggctgatcgaggggatggacaaaagcctgggggatatcatgaagtatctcagggaacatcatctggaaaaaaataccgtactggtgtttatgtcggataacggaggcctggccatctccggcagactgggcaatgaagaggccaattaccctctttccttcggcaaggggtcgtgcatggaaggcggtatccgggagcctatgattgtttcctggccgggcgtgacgaagggcggttcaaggtgtgccgtcccggtggttattgacgattttttcccaactcttctggatatcgccggatgccggaacgtagaagttccgcagaagcttgacggcttaagcctggttcctttgctcaaaggcggccggtttcctgaagaccgcccccttttgttccaccagccgaataattggggggaaggcagtcggcaggcgcctcagtatacttcttccaccgcattgcgccagggggattggaaattgatttaccgccacctgacccagagctttgagctgtaccatttaaggaaagatatcggcgagaaggaaaacctggcttccagggagccgcggaaaaccagggaaatggctgttgtcatgggcaggttgctccgggagaggaaggcgcagatgccaacctataagaaggacaatgagctgggcgctcctgccgggagttccgttccgtggcccgaccaggtgaaggggaatggtttttgatgatccgcaataacgtttttccaaagttttttcataacccccggcaggattcacgtcccgccgggcggaccgggtcgaggctggggtgccctcacttccttttccagtagttttttctgtccggtataggaatgtgtgtgttttcttttccggatgcagggtcatcgttcttcgtgaatgaaggccgcagcttgtttcggagtaaggggaggaatgagcaagggaactggttcgggagggataaaaacgccccgacggatatggcgtcggggcgtgacagaggttaaataacgaagttccctgaaagggagggtttaaaaatcatcggtgacagcggcatcatccgttgtcgtggtatcttcgctttcagcagcgctgtccgcagagggttcctcttccgttccggcagtatcgtcggcaggagtttcttccgtagcgcctggttcagaaacggacgttgctgcggatttggcagcgggcgctgcggacggagcagctcccttgggcggaacaacgactttcatggccggaggggcgggaacgggagtttccagaccgtcagccttgcgggtgctgacgcggagtccgtcagcataagccaggtttttcaggatggcatagcccagggcgggagcccggtccgtcgtgttgaccagcatcttgaagtggttgttgacggacatcttgcgggcgtccttgccattgcggaagggaatgatgcctgtcatgttgccgtcattgtcaatgcagatcgcccagaaagagcggtctacctggatgaagtactgcgggcggatgtagtccatcgttttccattcagcgcccttgatgtattcctccatggcgcggcgcgcattggccggcatgctgccccagtcagcgtaaacccgggaggtcagcgtttcacggccattgtagccgtgcacggatacgtgctgggcagtagcaaattgacgggcatagctctcgggagaggcaggttggcaagagctggtgaagagcgctgctccggcggtcaggatgcaggctgctgcagtagtgaagggatgaatgttagtcatggcaatcgcaatggttacgttataaaagaggaaaatacatcccatttcaaggaaaagaatgcaggaggtaccgttttgtgccgttttttgacgtttccgtttgatgcggggggctggcgggagtggggaaggcgttctcatgcccgtctcgcaggtatgatggtaaattactaaaatttttctcgcaaatcgttctgaatcgcttaggttgtcgttgctttatgtccgcctttatcatcagcctgccggccctggaacgcaacgctcttatcctgagggatgtggcggatgccgcagggtgccgcatcgctctggcgctgaaggggttttcctgctggccctgttttgaggccctgtccccctggctggacggctgctgcgcttccggcctgtgggaggcgcggctggcccggcgcaggttcgggaagcatgtgctgacttattctcccggccatgccccggaggaaatagcggagctggcggagatttccagccatcttgattttaacagcctgacgcagtggagccgtttccgggaggaagtgatgcggcatccccgctttgtttccggtgaattgaaatgcggcttgcgcgtcaatccccaatgttccaccgggcatacgcccatatatgacccctgtgcccccggttcccgcctgggcgtgacgccggacatgatgcagggggcggacctgtccggcatttccggtcttcattttcatactttatgcgaacagggagcggatgacctggcggtaacgatggatgcggtggaacgccacttcggccatcttctgagccgcccggagatttcctggctgaatatgggaggaggtcattggattaccaaacccgactatgaccggaagctgctggcggcacttatccgccgcatccgcgaacgctacggcgtggaagtatggctggaaccgggagaggccgctgccattcataccggggtgctgcggtgccgggtgttggaccttttttccgcggagggggtgaatcatgccattctggatgtttccgcatccgcccacatgccggatacgctggaaatgccttatcggccggatgtgttccagattgcaggagacgcttccctccgttccgcgcagcagcccgccgtacggttggaaggggagagctatgcgctggcggggaaggccggggaaaaagcttatacgtaccggctgggcgcccccacgtgcctggcgggagaccggctcggagattattccttcgcggagcccctggcggtaggtgacgaacttgtgtttgacgatatggcgcattatacgatggtgaagactacgtttttcaatggcgtgcgccatccggacatcgccgttcagagaaaagacggttccgtggagacggtgcgccgtttttcctatgaagattttgaggcccgcctgggctagaatatttgaccagacagattgacatggcaacagctaaagaaggcatcaagcagaaagtccgcgggtggagtcaccatgattccgcagatttgtacggcattgacgattgggggaacggttatttccgcatcagcaaaaagggagaggttaccgtacgcctgaatgacgaggatggaggaaagaaggatgtcagcctgtgcgatctgctggaggggctgaaggagcgcgggactaccgttcccgttctgttccggttccgggatttgctgcgcagccgtattgcggagctgaacgacagtttccggaaagcaatcaaggaggcggggtaccagggtaagtaccagggcgtttaccccatcaaggtgaaccagcagcgccaggtggtggaggagattgcggagttcggcaccaagtatgattacggtctggaggccggttccaagccggagctgatagccgccatggcccatatgcacaatccgaatgcctatctgatttgcaacgggtacaaggatgacgagtttattgacctggcgttgacggcccagaagatggggctgaatatttttattgtgctggaaatgccttccgagctggacgttattatggagcgtgccagaaggatggatatccgccctaatctgggcgtgcgcgtcaagctggcggccaaggggtccggtttatggcaggaatccgcgggggataagtccgttttcgggttgaacgcagcccaggtggtggatgtggtggataagctgaagcaggtggatgcgctggattgcctgaagctgctccattatcatcaggggtcccagattccaaatatttccgtggtgcgcgaggggctgacggaggcggtccgcatttacgtggacctggtgaaggagggcgcccctctgggcacgctggacatgggcggcggcctggccgtggattatgacggttccaagacgaatttccattcttcctgcaattattccattgcggagtttgcccgtgacgtggtggaggttgtgggagacatgtgttccaagtacggggttccccatcccacgctggtgacggagtccggacgggccgtagtggcctattattccgtgctggtgttcaacgtgctggatgtgacgagcgcgccgggcgaggaacctccgcccgagcttccggatgacgctccggagctgttgaaggcttttgcggatacggaccggacgctggccaggaagaatatgcaggagtgctataatgacgcctgctattaccgggaccagttgagagcccagtttttttacgggaacgccaccctacggcagcgcgggctgggagaggcttattattggcatatcctgagccgcatttcccgcatgctggcggagatggagaccattccggaggatctcagggagctttcctgctccatggtggacttttattacggcaatttttcactgttccagtctcttccggattcctgggccatccgccagcttttccccgtgatgcctctgcaccgtctgaatgagcggcccacgaataaggccgtattggcggatattacgtgcgattgcgacggaaagatagaccatttcattgaccgtgaggacgtggcaaccgccctccccctgcatgccatcaaacccggcgaggacgattattacataggcgtattcctggtaggagcctatcaggagaccttgggggatttgcataacctgctgggagatacgaatgtggttggcgtgcatctggaaggcggccgccccgtttatacccatgaagtggagggcgatacggtgtccgatgtcctttcctacgtggagtatgatcccaaggagttgatcaacaagttccgcacgtttgcggagcaagccgtagccgaggggaaaatatctccgtccgaacgccggagagccttggaagtgttccgttccggattgaatggatacacttattacgaactgtaggaaacggtcttgtcttttgcttcaacagggagcgtttgtcccgtgccggcgcgttttcctttgttgcggatcaggagaccagcggttcttccggcggtttcgtttcttcaatgaccttggctggcgtcagggcccagaagcgcgtggccgtttgcggagagatgcctttcatgttcaagtaccgtgtgcggagcagggaggaggagcggtgccccatttccatttgcaacaggttgtagtccttgaagtgcttggcgtggtagctggcgtaggtgtgccgcaggcagtccggcacccatgatttttttcttcctccccagccggcttttttccggattttgcgccacttgattgtccaccctttcgggcagatgggagttccgggtccgggtttggtcctgtcacggcagaatttgagccatttggcgagcacgggcaggatggtgacgtgcctggcgcctccggttttggtatgcttggagttcagaatgatacagccgtcgcggagagcgatgttttcccagagcaggcgttccacttcctgcgggcggattcctgcaaagatcatcagcgccgctccggctgcgcagcttccgtcaaattcttccatggctgccttgagaagctgagttatttccttcagcgtcagagcggggatttcctgctcctgcagaaaaggcgtgtctacgcggaggatgggattctcgtcacaccatccgcgtttgacggagaacgagaaaattccgctcaagatgagcctcgctttgtgcctctgccgggatgtggtaaaggtattcatcaggatgttctggcattcctccacgctcaggttgcgcagggaggtgtgttccagttccggattgctctttttaagcttgtggatgatgctcctgatgtccgtcagcgtccggggacggcggtggcttttggaacgtaggcattccacggccgccgtgccgaaactgacggtttgatgtttgtttttaatggcgttcaatcccagggagacgacttcccggcaccgggtaatggtacagatttcatctccaagggcttccttgatttccaataccagccttgcagcctggatcagggtgactgattccccctccagaagtgcggctccgacatatttcaatttgtttgtattcggtgcttttttcatgttcatttctcgtgtttgtccaaacacggttttaatgaaaaaggctatccttataatggggaaaacttatgctttccactagaaaacgcgtaaccgtcaaggatatgttgttacttatgttttctttgaaccggccgcaaaatcaaagtttctgatggtgcaggaaccgaaaatgttagaaagcgcggctccctgtgctgaatgtcaagatggacgtgacttgtccggcatgagtatatttctgtcggaagaggggtaaaggaacggccggatgaaagtattttatatggctgaacgtatatggtaggtactgcttttctgtaccatgaatatcagaattcattctttcaacgtatcatgtgttggcctttgctgcgtattggggtcttttttcgcggcggacgcccgtgaggtttatcccctgaacggttcctgggatttcagttttaacgggaagcctgctgaaaaagtgacggtgccccatacatggaacgcagaggatgccgccaatggtgctcaggggaagcgggaagacgccaaatccgtcaacagtgacgcctaccgccgcgggccggccgtttattcgcgcacgcttccggtggagcccaggccgggcaagaggtatttcatccgcggcgggggagccagcattgtttccgaggtttccgtcaatgggaagcctgccggcagccatgagggggcgtttacggctttctgttatgaaataacgccccttttgaaaaaaggctccaatacgatttccgttctggtggacaacacgcagcgtaatcatatcgccccccagcgcggggatttttccatgttcggcgggctgtaccggcccattgaactgattgagacggacggtgtctgcattgatcctcttttttatgcttctcccggcgttttcatcacgacaaagtctttaagcaaatccaaggccgaggtggaagtgaagacccttctcaattcggacggaaaggccggggatgtggatgttgccgtggaaatcctggacatgaagggcaggaaggtagccgggaagacggtaaaggccgccgccggggaaaagaatagactggaggttcccgtaacgctggcaatcgccaatcccatactctggaacggagtgaagaatccttacctgtaccaggtgaaaacttccatcaggacggcagatggccagacggatgagctggtgcagccgctgggactgaggacggtttccgtcaatcccaaggaaggttttgtcctgaacggaaagaccatgcagatcaagggggtcagccgccatcaggatatgaaggggaaggggtgggccctttccccggaagatgaggcgcgggatatcaggctgattgcggatatgggggcggatggggttagaacgggccactatcccgcatccaccaatatttacgacctgtgcgacaaggcggggctgattgtctggtccgaggtccccaatgtcaacctggtgtgggatacgccggagttccgggagaataaccgcctccaggcccgggagatgattttccagcattggaatcatccctccatttgcatgtggggaattttcaatgaaatcggacaccagcccgaggctgccacgagaggagtggacatggaagctgagttgacggaattgaacaagttcgtgaaggagactgatccctcccgcatgaccgtgggggccagcaatcaggcgggccgcagaaaactgaacaatattcctgaccacatcgcattcaatacgtatcccggctggtacggaggagggcccgaaaccatgaagggcaacctgaacggctacatccgcgactatggcggcaagatgggcattgccgtcagtgagtatggtcacggcgccagcgtggacatgcatgagaatccggcccaaagaccgtctcccaccggattctggcatccggaggaatggcagtcccatgcgcatgaggtcaattacaggtgcatcagggaaaggccggaggtgtggggggcctttgtctggaacatgtttgacttcggttcctcttcccgttttgagggggaaagccccggcattaacgacaaggggctggtgacctatgaccgcaagacgcccaaggacgcctattttttctacagggccaactggagcccccgtcctaccgtatacatcacatcccgcaggtttgcggaacgtacggaaaaaacggtgcccgtgaaggtttacagcaatggttccgtggtgaagctgagcgtcaacgggaagcccgttgggagtgtcaaaccggatgatttgaagcgcgccgtctggccggaagtgactctcaagcccggcgtcaacactattacggccacggcttccataggagggaaaacgtacacggattcctgcaagtggacgttgaaccctgccggaggtgacgggaagaaggattcagagcgttatcaggatccgtccctgaaaaagtataagtaagcaattccatattcattccgagatgaagacggtacgcgcgtttctgttttccgtgatgtgtctggctccggctcttcccctgctgggggatgttccggattgggaaaatgaagaggtgacgggaatcaataaggaggctccccgagcctccgtttttccggcatcggataaaacgttgagcttgaacggggattggaagttcaaaatttccatgactccggacgagaggcctgccgatttcttcaatccctcttattccgtttccggatgggatacggtcaaggttccttccaactggcagctttacggttatggaacggccatttacacgaatgttccctatccattcaagccgaatcctcccaaggtaatgggggaaccgcccaagaactggccggcgtacagggagcgtaattccgtgggttcctaccgccgggatttcaatttgcccgtttcctggaagggagagcaggtgatgatccggtttgacggggtggagtccgccttttatgtgtgggtaaatggccgtcaagtcggctattccgaagattcctatacaggggcggagtttgaccttactccctatgtcaggcccggcaggaatacgattgccgtggaagtataccgctggagcgacggttcttacctggaggaccaggatttcctgcgcctttccggcattttccgggacgtgaccctgtttgcccagccgcagacgcacgtgcgtgacctgttcctgaaggccggactggacagggaggattacacaaccggggtactggacggaacgttcaccatccgcaattccggtaaaaaggatattcccgccggcatgaagctgaattattccatcgacgggatttccaccaaattgaactgggagggcaggaacggttccggccgcgtgcagacggataacaggggaaggctggattccggaacgctggaggttccctccattccctccggaggcgaggtgcagatttccctgaacaggaaatttcccggtgtgaagccatggacggcggaaacgcccaacctgtacagggtgacttattctctgaatggaaaggatacccgttccgtcaatatcgggttccgttccgtggagattgcggataacggcgccgtgctgattaacggcagagccgtcaagttcaagggtgtcaaccgccatgaagcccatcccgattacgggcgcgccattccgcgggaagtgatggaaaaggacgtgcagattatcaaggcgcataatatcaataccgtccgttgttcccactatcccaatcatccttatttttatgagttgtgcgaccgctacggcctgtacgtgatggacgaagccaactgcgaagcccacggcatccgcaatagcagcatggatatttcccggaagccttcctggaagaaagcccatgtggagcgcaatatgagcatggtgcatcgttccaagaaccacccttccattgttttctggtccctgggcaatgagtccggaaacggccccaattttgaggcggcagcggcggctatcagggcttatgacactacgcggcccctccattactgcgaatttccgcacggccacaaggccgtggatatggattccgccatgtatccgcccgtggaccgggtggaaaactgggggaagcagaaaacttcccgcccctttttcgtgtgcgaatatgcccactccatggggaatgccctggggaatttcaaggagtacatggatgccttcgagtcttccccgcgcatggtgggcggggccatctgggatttcgtggaccagtccctccgcgccaatcctgccggaaacggcatttacaagcccgcccctttcaagggagtaacacaggcttacggcggcatgttcggagacaggcccaaccaggccaatttctgcgacaacggcattattcttggcaaccggaacaccacggccaagacgaaagaggtgaagaaagtataccagtacatggcttttgagcgcaaggacgggtccctgtccgttcgcaacaaatatttccataagcctttgaaaggttatacgctttatctggtatcccttgttcccggcggcggccatgccgtggagcgcatggttctgccggaggttccccccggcaaatccgcaacggttaatctgccttcagccgctatgcggaccggttccctgatggttctggcggatgcccggttcaagctcccggaagacgtgaaggaactttcctccaagcaactggaacatgtggtgaatgagtgcgaagcttacgagtggttcccggcatctgcagagaaggaggttcccgtgcctcccccggcggcgctgcctgctgtttccgtgctccagggggattccgtggtcgtgcagggaaaaggtttttccgcctccttcaaaaacgggatgctttcctccctccggtatgacggccgggatttgattttgcccggctatccggtggagctccaggcgtaccgttctccggtggataacgatgcctggatcaggagcaaggttgaagggaaaatgaagatgcagaatatgaaagcggaatattccgacgttaaagctgccgtcatttcccccggcgtggcccgaatcacggcacagttccggacgaaaggttccgagcttgccttttccggggaagtcgcgtggacggttttcggcaacggcattatcaatgcttccgtccgaatgtatccctccgccaagggagaagaactccttcggctgggcgtcactttcgggatgcctgccgcgtatgaccgggtagagtacctggggctgggaccgtgggataattaccgggaccgccgcacgagctgctggaaggacattttccgcacttccgtggacgatatgttttttgcttattcccggccccaggatatgggcaaccgcatggaaacggactggatagccttgtccaaaccccaggaggaccaggctctgtgggtgggggccgcctctcccagggctccgctggaggtttccgtcctgcgttatacgccgaaggagcttaacgatgccaggagcctggacaggctgccggagaaaaataaagtgattgtgaatctggatgctttccagatggggctgggcggctcttcctgcgggccccgtccgctggtcaagtaccagacattgagcggggccacagccctggggtttgtgctggctccctcatccgccctgctgaatctggcgcgcacggggctggccgttccccattcccctgtcattgaacgggatggggacggcatggtcagtctgacttcctctacgcccgaggcggagataaagtattccgtcaacaaggggccggaaaaaacgtaccggaatcccttcaaacttcccgaaggggaagtgagggcctgggctgcctccatgaagtccggcaaggttccttccacgtctcccggagagaggaaattccccctcgtcaaggggcagggcgaatggaaaattctaagcgcttcttcggaagagccggataccggtttcgcccattttgccattgacgggaatccggatacctattggcatacgtcctatacgaacggcctgccggggttcccccactccattgccgtggatatgggaaccagaatgaagtttaccggatttatctacacgcccagaatggacaaggacaagggcctcatcagccagtacacgttttccgtttccgatgacggtcggaattggagggaagtgaaaaaaggccagttctcctaccactatatccggaaggatccggctgttcagcgcatcgacttcggcaggcctgtggaggcccgctactttaagcttgacgcccggtctccggtgaggggcggggaacagagcgccaccgttgcggagctgaatatcattacccaataacggagcggcaggcgttttgcactgcttcccggatggagaagttttccagccgtgcgccctttccggggtgcacggcttgttgttgcgggcttttcagggtgcggaaatgtttttttaatgaaagaaagaacatggcggaatggtaacatacgcatgcgcaagatgatggcctgcatgctgggcgctgccctgtgtttttccatggccggagcggaaacaggcgtttcctctgcggaaaaagcttcacccctgttcgggaggatgatctggaatcgcggctgggagttccggcttgaggacgagcccggaaagagcggctggcagacggttcatctgccccatacgttcagtctgccctactttatgtccgattccttttacacggggttcggctcctaccgcaggaagcttgtcatgccggaggaatggcaggggaagaaggtgtttctggattgcggcgcagctttccaggtggcggaggtgaaggtgaatgggaagactgcgggaaggcatgaaggggggtatacggccttccggtcggatttgacgcctttcctgaagcccggcgagaactgggtggaggtacgggtggataaccgctggagcccccgcattgcgcctcgggcgggggagcatactttttccggaggactgtaccggaacgtgcatctgcacgtgtgttctcccgtgtatttgcccgcgcacggagtatgggttcagacgccggaggtgacggaggcccgcgggaaggtccggattttgacggaagtgaagaatgataccgggacagtgaggaaagtgacggtgcggcatactgtgcgggatgagcaaagcggctgcgtggtgctgcggggagagaagggcgcggaactgggggccggggaagattctcgcgtacaggctgacctgcctcctctggcttctcccaggttgtggagccctgcggcccccaatatgtaccgtgtgacgacggaattgttggacgagaaggggaaggtgctggaccgggctgaaaatcccctggggttccgtactctggaggtgacggcggaccggggcatgttgattaacgggaaacctgtttatttgcagggggccaatgtgcaccaggaccacgccgggtggggggatgccgtgacggacgccggggcccgccgtgatgtgcggctgatgaagaacgccgggtttaatttcatccgcggctcccattaccctcattcccaggcttttctggatgcttgcgaccgggagggcatgtgcatgctgaatgaaggcgttttctggggaatgggcgggttcaaggagcatgacaggtactggaattgcgatgcctatccagcggaaaagaaggaccgtattgcgtttgaggaaagctgcatgcgccaggtgagggagatggtgctgcaattccgcaaccatccttccatcgtcatctggagcagcagcaatgaaccgttttttaccaggcatgcgccggaggccagggctttgtgcaacaggctcattaccttggtgaaggagttggacccgacacgccccgtgtgcgccgggggcgggcagcgcggaaattttgacaagctgggggacatggccgcctttaacggggacggctcccatgtgaagacgcccggcaggcccagcatggtgacggagtatggttccgtgagctgccggaggccgggggtgtatgcgcctggctggggggatatgaaaaaggataaggaagcggggattcgctatccctggcgcgtgggagaggcggtctggtgcggctttgaccacggtagcatctggccttccggagggcgcatgggcatcgtggattacttccgcattcccaagcgggcctggtactggtacaggaacgcgttgaggaatattcctcctccggagtggcctgtggaggggactccggcacaggtgaagctgtccgcggacaagaaagttatcaacccggcggacggcacggatgacgtgcatgtgaccgtgaaagtggcggacgccgccgggaggcagatatccaatgccgtgccggtaacgcttacggtggaatcgggacccggggagttccccaccggcaaaagcattacgttcacgcccggaacggatattgatttgattgacggctgtgcggcgattgagttccggtcttattatgccgggaagacagtgatcagggcgtcttctcccggattgaagggggatagcctccaaatcgtttgccggaatgctccggcttacgtagcgggcaggagcgcggaaacgcgggaaaggccctacaagcgttttagcgcaaaggagagggatatccagctggcgcggtacggacggcccgaatccggagagaaagccaatttggctgtattgaggccctgttccgcttcctccggatttcaggaggcgatgaaggcttccgacggtgacgatgtttccgcatggcatccgtccgaggaagacaaagcgccgtggtggcagctggacatggagtttgaattccgcctggaccgggtggaggtgaaggccgccggaagctggaaggggccggctcccgcggttcaggtcagcagggacggaaatagctggaaggacattaaagccgttttgcgcaaggatgggacggagctgaccgcaatgtgtccggaagggaccggcgccaggtacgtacgcatccgtctgtctccggggcagggaattgcggaagtggccgtatggccggcggatgcgtcatgagggttcccgtttttccggaacaggaggctttttcctgttactgcgcgtaccggagtttccggcgtcttcttccgtccgctggcggcgcagtttgtcccaataggccaggcgtttattgatttcccgttcaaaaccccgttccggcggcctgtagaaccggcggcggggcatattgtccggaaagtagttttgcccggagaaagcgtccggcgcgtcatgatcgtatgcgtaattctttccatagcccagttccttcattagtttggtgggcgcgttgaggatgtgtgccgggggcatcagggacccgtattcccgtgccgctttccgtgccgctccccacgcggtgtaggcgctgttggatttgggggcgcagcccaggtagataatcagttcagcaatcgccagctctccttccggagagcccaggcgttcataggtgtcccacgcggcaatggccatttgaagtgcggcagggtccgccagactgatatcctccatggcgaaacgggtcaggcggcgcaggaggtagagagggtcctccccgccctcgagcatgcgtgcggcccagtacagggctgcgtccgtatccgacccccgcagggatttatgcagggcgctgatgagattgtaatggccttcccggtccttatcgtaaaccggggcgcgctgctggacaattttcagcagtgcgtccgtgcccagcatttcatcgggcttgcagaggtcaaagacgctttccatcaggttaatgaggtagcgtccgtctccgtctgccagttctatcagggtggcgcgcgcttccggcgcgagcggcagttctcgctgaagaagggtttccgcccgttcaatgatgctttccagagccggggcgtccagggagtgcatgacaaagactttgcagcgggagaggagggcgctgttcagttcaaaggaggggttttccgtagtggcccccaccagcgtaacggttccgttttccacatatggcagaaaaccgtcctgctgggcgcggttgaaccgatgtatttcatccacgaacaggagggtcccatggccgtattccctgcgcctggccgcttcgtcaaaggcttttctcaaatccgccatgccggagaagacggcggagagagctgcgaaatgcatggacgtgcgcgtcgccagaatgcgcgccagcgtggtttttccgcagccgggcggcccccacagaataaagctggtcatcttgccggagtccgccatgagccggagaggtcctccttcccccagcagatgatcctggcccatgatgtcttccagtgcggacggcctcaggcggtccgccagagggcggtccgcgaaggcggaaaacaggcccggggtgtcgtcttttttcatgatgcccatcatacgccgccggtaaaaggaaggcaaggggagcctgatggcatttcaggcggcccggctcgacggcacgtcgtggagaggaggttgcaccccggttttgacgggtggaagagaagcaggggagaaaaggaaagattcctgggaaaaacagtgtatattgaacatgatgttcagacatgtttcccatgtgtttctttttctgttttccggcttatgcggcgcggtcgtgaatgctcaggatcagataataccccggcccgtgtccgtgagggtagaggccaagggggcggcaacgcccgtgaagctggatgaaggaatgcgcattgtatgcaaggagaaggacggggagttccggcgccaggctcacttgttgcagcagtttttgtcacgcggaaccggattggctctggacggggctggcggtacgggaataatccgcgttgtgaaggacgctgccctgaagcagtacgggccggaggcataccgtttggaagcggctcccggaaatatcgtcatcagcgccgcgactcccaaaggagtttattatgcagggcaaagtctggcgcagatgctgcctgccgcctttttcaacaatggcgtggacaaaaagagcgtaagttggaatgtggcggtgaagcctttttccatattggattatccccgttttgcctggagagcctttatgctggatgaagcacggcatttttttggagaggaggaggtgaagaggctgattgaccaaatggggctcctgaaaatgaatgtcctgcactggcatttgtcggatgatgccggatggcgcatccagattaaaaaatatcccaaactgacatccgtgggaggcaagagaagagatacggagatagagacgtgggggagcggcaagtatgaaggcaggccccatgaaggtttttatacgcaggaacaggtcaggcgcattgtccggtatgcggccgacaggaacataacgattgttcctgaaatagatattccgggccattccgccgccgccatcgtttcctatccggagttgaaattgtccgccaggcctctcgcggaagtgcccgtgagtttcaatgacggagcggcgtttgatcccaccagcgaacgtgcctaccagttcctgggagacatcatgacagagctggcttccctgtttcccggaggtatcattcacatcggcggtgacgaggtgcggtacaaaaagtactgggaaggcgtgccccacattgaagcgttcatgaagaaaaagggcattaagacttttcccgaccttcaaatcatgtttacgaatcggatttccggcatgctggctgagagggggcgccggatgatggggtggaatgaaatcctggggtccgacgtgcacaatgacggcggccggggagcggcgctcggcaaactggatgcaagtgctatcattcatttctggtatgggtccgataaaattgccgccaaggcgatcagggaaggccgccaggtggtgaattccacttcccacatgacttacattaacaaagggtatgacaagctccctctgtccaagtcctattcttttgagcccgtttttgcgggattgaatccggagcagcagaagaatgtcatcgggctgggttgccaggtctggacggaatggattgcggacgtggagaaactgcaccgtcatgtatttccccgtattgccgcttatgcggagacggggtggacccggaaggaggataaaaattttcaggatttccggaggcgtttgacggggtatgaaaaaattctggatgccctgggcatccggcacggggaaaaggaatagttgaaaattcgccgccggggatgaagcattctggctgagtcaacagtaagcccgcttgttacttggttaaggattcggaagagttcctgtctgtggcttcttaaggcattccgcccgcgcctgcatgttttccagaattttcagaatataagaacgcgttgtagccgagtgttccgctccgcgtacgaaggaaagccccctgtacagtcctaccgtttccaggcggagattcatattttctccggacaggtcttcactggagggaggaggataattggaagcggggccgttcagggacttcatctgcatggtatccatattaagcaggcagctttgtattccgttagtgaaaatcaggctgccctgatgatgcttgtcctccggccacagcctgtaaatggtaacggcgcttctccctccgggattgatcaaaatggcggggaaaacgtgtttgccgccaccctttttccggacggtcgcgtcaaagtcgcattctccggaaaacctggtcgtaacacgggaggagatgcatacttcaaaaggtacttccggcggcaggggaatcatggtggcggcagataggggcgaccccggagggagttccggaatcgggaaggggaacgtaatgatgtcaatggcgcagctgatgatgccgatgatggcgaatagcaggatgcctttgttccggagctgggctgacagcatttttccatattcctccggataatgcctgcctgcggctggttcctgccgcaggtaatagccggtcaggcgtgaaataacggtcagagcggcagccatggctgccagccatgccagggcaaaagccagattttccgctatgggaattgtggtgaaaaagccgaatgttccaataatgaacgccgtcagcaggagaaagacagccaagaaggttatgcagcctaaaggggccgtggagacgggaatccagaaaatgccgcgtttgccgagggctctcagaatcagaatggcaatgcaaaaagagaagatggccagcgttgaataaaaatgttgaaacagataatcgagcatggcatgcgggaaaaacttggataggcaagcggggagcgattccatgccgatttcctgaaaagtatccggaaacaagcagttttgcgccgcgaaacgatagaagctgaatgttgaactcctttattattctagcctttttccatccttgcctgcaagattttttgtttacctgtttctttctatttgtttttgatatgtttaaaaagcattgtcccataaacaaatatgggaaaaaaccgactccattttcttttggtgaaaaagatgcggttttctataagcggaggattccgaaatggtaaaactgtgtgttatggataaggggaaaagagtattcctgccatggaaatgttttttcccgtttatgaatgaaaccgctacgccggcttttcattcatccttttcaagagaccgggcggggagaagagccccggccggattttacctgcaagagcgtggggcaggcagttccggacgggttgatgaggaaaaacgcttccctgaagaaactgctaccgctgtttcggctttgccggcactttcctgagtttcgcgaagcggggcagggaatattccttttgcatggccgtttctccctggatcaggggaagaacgtaatcaatgaacggctgttccacgccattgccgcgggcgttgatccattcgcggggaacaagtttttccacattggccacttctcccagacctatcaatttagtcttgcaggaataaatgccgttctccgtgattcgttcaaaggctaccattttatccgtctggccggaaacggcggcttccacggcggcttttcccgccatatacgcttcatcgatatccgttttggaggcgacatgggaggcgcagcgctggaggagtgagagttcaatgcttctgactttggccccggtttgccgcttgacggattccgcaagcatggctcccaggcctcccagctgcgtatggccgaagacgtccctgtctccggattccgcaacaaagcggccgtctgcatattgcacgccttccgagacggcgaccatgcagctgccgttctgcctgtaaatccggtccacatcctgccagaattcctccatgcggaagggaacttccggaaggtaaaccaagtccggacctgctcccgcatacgtggccagggctgcggatccggccagccagccggcgtggcggcccatgatttccacaatggtgacgcgtcccttgtcgtacacgcggaggtcctggtgaacttccatgcaggaggtagcgataaatttggcggcggatccgaagccggggcagtggtccgtgccgtgaaggtcattgtcaatggttttggggattccgatgacgcggcattcgtaaccggactgctgcatgaatttggatatcttgttgcaggtatccatggaatcgttgcccccgttgtagaaaaagtagcgtacgtcgtattttcggaatatttccagcagacggcggtaatccgtatcatccacggatggggcggacatcttgtaacggcaggaacccagggccgaggccggagtatatttgagcaattccaattctccggggtcttcccgagccatatcgaacaggcgttctttgagcactccctcaatcccgttggcggctcccagcacgcgcgtgacctgttcgctttgcagggcggactgaatggctcccagtgcgctggcgttgatgacggcggtggggccaccggactggccgatgatgcatgctcctttcaatgggttcatgggcaataatggatgagagagttgtgttgcgccccctttcaacggcgttggaggcaggaaatgaaatgatagtcaaacctatccgcagcccggagggatgtcaaacattattggttttccggatggggctggcggggctggagaaagtggggaagaaaaaagagccggggtatcagttttttttgtctccagagcttttccaatgcggaggcaaagcgttcctagggccagaattccatgcgtacccagatggacggtatccgtgggatagggggtgcggaagtccacgctgcgcagctggagatcgtctgcggggacataaaccgcattgttgacggagagggaggtacgggattcttccgccacatccttttgcccctgccgcacttcttccctgcccggaaaacgggccggagcgggcacgggaagaacgctgccgtagataaaggccagaccgggggcttccagatccgctctgatgcgtttaatcaggttgttcaggttggcgccgtaagacagagcgtttttgatgccggcaatgtcccttgcgtctccttccccctgttgccacaccatggctttcaggacaggagcatgtctctgtttttttcagagcttccattccgttgcggacggtacggatcagtttgacgtattcttccccctgcttatcctgagaagtttttcctgggttccattgccggaaaaggttgcttccgctccgggcgtgtttgatgatggcccatttttttgcgggaattttttctgcaacgctgttcccaggcttagttccacgccaaaacggtcgggggattcggatgccgggttcaagggaacaagctgttctgccggtcctgtccctttgagggagccggaatagtacagaagaatccgtttatccgtcttgaagcagggaggaatgttgttgacatatccttgccctgtggcgtttgactggccgccgataaggatgacgttgatttcatccgcatgcaggggtggcgccggaaagaccgtcaggggagcaaagcagccatgaaaagaggaaaaaacgtgcagagcgtggaagtacggaaacaatcatggcggggatatccctgatacgttttcggaaagaagattctgtcttctggaggaattcttctttgcctgctgccaggatattttactgttggtgctcttgttcccttgattctttcctttccggaaaaaggcattatgcggaaggtgcgtgcagggaaacggattggccggggtatatttccggaatgacggaaatgctcttgatatttttcccggctgtcagggagcggagcatccgtatgagcttgtgaaccgtttttgtctggttctcttcataataggtgatcgtgggcagcaggcgttccatgaagggttcatacgtcaggctgaccaggctgagctgatccggaatgctcagcgaacgggcttccacccaggaaaggatgggaacgatctggttgccccgtgtggctaccagggcggacatatccggatgttctttaaacgctttggccaggtattcaaagaagagaggcgtttcaaacggggtgggaaccaggatgggattccatccctgttccgcaaagctgaaaaaacctttttgcatgagctggtggcccttcaacggatcaggaggcaggcacaggcctaccgttcggtgccccttgttccaaaggtgctgcgccgcatgatgcgtggtggccgcccagtggcggtccagatagggaaggttgctgctctggtaggaggtgccgcgcacaatgcaggggatgcggtgcgtcttgaaccagagctgggtttgctccgaggaacggtgaagtatccagcagacgcattcggatttggtaacaagcttggcaagcctcttgtccgggttattgcctaagatccagggagcttcaaagatacggacgctgatgccgtcttcctccagaattttggagatggtatatatctccgccaatacgctttgagccagccttttgaggggctggggcgtcagaaatccgagaatttcttttttttcctgaaccggatggcagaagatatttttaaccgtttcttcttccgtagttttcaggatgcgcctcggaaccttgatgcgtgggggggcaatccatgcatccctttccagaagggccagggcctttctgatggtttccctgcctacggataacctgtgcccgagttctctttctccgggcaggatattgaccaggctgccgctgagaatcatctgtttgattttattggctactgtttcaaccaatgaagaagctggcaacgaagtcatactcttgtatatacgtatcgcattgcgtgaattcgagccaattgtagggattgcctgccccgcagaatccaaaaggagagctggtgttgttgcaagttgttgatattctgtaaatcgttttaggatttaagctactggtcttttttgatgaggtaaagtgggcagataatgtataaatgatatggtgttatcaatgcattacattcctgagcggtacggttgcaggtggtttgtaattatttcttaattcatttaagataaatattttattgcgtattttgttgggcggagccatttcttattctccattttctcactttcccccatattttcgctaggaaatgtgcacgtatcggcatggatgacttttctcccgtttccggcactaaatctgcttgatgaaagtgaataccataccgggcgcatcctatgcgctgacttgtacggctgcgtgtactatccatgcgcttcttagcgacgcttcttctctggttatcctggaaacggaaaaccccggacaatatttttttatagctcccactgatacaatagaggtatcagacgaacacgccttggtgacacaaacttttaaagcagccgctccgggattgtctgcccgcagcggcataaggtcgggagtaaatgctgatttaaaaaatccgacggtggaaaaagcggtatgaaccatttcttttttctgatcgcccgcgattaagcgcagcgctcatgagcaatccggtcaaaaggttgtttgtccatggtttttcgaacctttacggggagcgggacttcaccgccagatcattgtctgacgcggactgggtgcggaagtccgtctcattccttcctgaaattactacggggaagtctctttgagaaatgaagcgttatcgactgataatagaaaaccctgggagcgtttagctcccagggtttattgattggtaccgccggtgggactcgaacccacactcttttggaactcgattttgagtcgagcgcgtctaccattccgccacgacggcacgtgaagcgaaagaattaagaggcaagagggctggagagtcaagaatttcctgtggaatatggtgagctgctgaaaaaacggagggattttcctgcggattccctccgtcatgtttccggatggaaataagtgtttggaatgagcagtgcacggccgcgttaacgcttttttgcgtcccttctcacgccgccaactcccaaaatgctcgcacctcgcatcctcgaatcccctgcgtatgcacatagcgcgtctgcaacagcgtcccgtcccgatgccccatcgccgcctgcaaacgcccccaatcgtgaaacatcttcgcatgatacgacgcaaaggtatgccgcaggacgtcctgacgccatgtctgaaaacccgctgccgagcgcaaagcgcgccaccgcctgttccaatctggcggacagatgaaaaccgactccctctctgccccctgcggataataactcctcaaccatgccaacacggagcgagacagcggcacctgccgaccgccgcccgtcttgctctgcctcgggcgaatccgcacctccccctcctcccaatccacatcgccccaggtcaaacgccgcacctcatacggacgaatcccgccgtagagcatcatcgccacgcccgccgcacagggggaaaactcctccctctctgccgtccgcagtaggcggcgcacttcctcgatacggagggggacgatctcccgctccgtcacgcgcggcacatccaccagccgcacgggattatgcgcacaccagcctttcttccacgccaccgtgaacactcccgagagaatcgcccgcgcatgacgacgttgcgagggtgaaagaaagactttctccaacacagccgcacagtccgccgtcgtcatcgagcgcatgggacgcgccgccagatcgggcacatctcgcatcatcctctgcgtgaaggagcggatatcgcgcagggtgagcgccgaacggtcggccttgacgcgcagggtttctgccacggctttggagaaggagaccgtttgcgtggcgagatgctcggcttcgcaccccaaggcgatgacgcggcggcagtgaaggagcagagcttctttctttcttacggaagagcctccgcttccttcgaccagctccagcatgagacgagcaacatcggtgagggagaaggggagagaggcgaggagggcaagggcggtgctagcgtcggtgttcatggcaacaggataaataatactcttcatcaagcccaaaataacgaaacttgtcaaaaacatggaatagaacggtagttatgcctgtatgacaagaaaaaaatgagaagaattttcttcctttttttcttgtttctttgtctggatcaataatataatatattgagaatcaaaacattgaagttaagagcattatttatactctacttccctcgatgaaacatcgagggaatgaggcttcgggagagacgcaactcgatgcctcccttgtggctattctcctcgccgaccgttcgagcggcgctttcatccgctgggcctgcaacgcctacactacccacggcgagtcctatgcggcggatcaagagatctacccccatcaggtgcatctgattcaggagcgcacccgcaagacgcaggaagaacagcgcgaccgcaccaaaaaatccgccgaagtctttacccctgcctggctgtgcaacgctatgatcaacgcccgcgatgccgtttacttcgggcgggaggaggtctttaaccgcatggaggctccatcgtggacgccgacgcgcaagacgattgactttccgacgacagcatctggccgccgtctcgcgtgggagcgttacatcgatgcccgctgtctggaaatcacctgcggcgaagccccctttctcgtctcgcgctacgatgccgccgacggtcgccccatccccttggcggagcgcatcggcatcctcgaccgcaagctgcgtatcatcggcgagcatacctgcaccgcagaggactggttccactgggcaaaacgcgccctcgaaagcgcctacgcttacgaataccagggcgacagcctctttctcgcccgtctcaatctttttctgagcattagcgagtaccaccgtcacctgtggaaacgccccctcaaccgacaccaacaagaggaagtcgcccgcatcctctcgtggaatctctggcagatggacggcctgacggcgacgactccctttgtcacgaaacaggggaagcccgaggattccttatttgatttttacgccatcacagccgaaaggcgccccctccgtagcctcatccgcgactggcgcggcaaaaaaacgattcgattctctgaactcaacctatccaccaccatgaaatttgattttgttatcggtaatccgccgtatcaggaaatgagtaaaaataagatgactcgcagcatttatcctgattttgtaagatcatctcaagcaataggtcaaattgtttcccttgtgatgcctgctcgttggatgtccggtgaaaatgggccctatcgcgaaactcaacatttcattgatgaaatgttgaagggggatcatcttcaatcctttcatttatacccaaactcctctgatttgttccccaatgttgatatcaaggggggagtttgtttctttgtttggaatagagcgtattcgtgcgatagggtcaattatacgataacagagaacggcgcatataagaaagttctcacttcattccgcattgccgagaatgtcattatacgctttccggagctcatatctattttggaaaagacgaaagctatatcgacaatctaccttaatacatgggtttcatcgaggaatccatttggattcatatccgatctctttacgaagaacaaggaaggcgtttctcgcattagtgaagaaaagcaacaagatgatgactatttggttcacggtcttctcaaaaacaagagagtcataaggtatatacccaactctgccttaaagaaaaacatacacatcgcccattcttataaggtttttctacctcgtgcaaatggtagtggagtatttggcgaagtctttagtacccctatgattggtacccctatgatgatatgcacggaaacatttttacagattggggtcttcgataactgtacagaagctgaaaatctattgaagtatgtgaaaaccaagtattttaggacaatggtcgggattaagaaaacggctgtctttaattacaaggagtgtttcacttttgtccccctccaagacttcaccgccgccagcgatatagactggtcacggtctgtagccgagattgaccgacagctgtacgccaagtacggcttgtccgcagaggaggttgcctttattgaagaaaaaatcaaacccatggaataagccctatgaacgccatctctatccgaagcacgaagaaggttgagccgaagtgttacgcctacacgactccagaggtgcagcgacacgagggctggacgaagattggctacaccgagcaggatgatgtcgaggtgcgcatccgccagcagacgcagacggtggatgtgcgctattgcctggaatggcacgagtcggcgcgttttgccgacgggacggtgtttcacgataaggcgtttcatcgttacttgggcaagaaggaggtggaacgcgaggggaattcggagtggtttcatcttgtgcccgaggtggcgcatggtcattttcgggagtttacccgcaatcgcggggtgttgcagacgccgggtgcggtgccttatgtgttgcgggcggagcaggcggaggcggtcgagcggacgcggctctatatggcgagccacgcggggcaaagcccggagtttttgtggaatgccaagccgcgtttcggcaagactttggcggcgtatgatttgtgcaagcagatgggtgcgcggacggtgttgattgtgacgaatcgtccggcgattgctcattcgtggtacgatgattatgtgcgttttatggggacggagtcggggtattatttcatcagtggggcggatgctctgcggggcttgccccatgtgctggagcgcgcgcagttgccgagtgatgccgaggggtatatcgagtttgtgtctctgcaggatttgaagggttctctgtatttcggcggggagttcgataagttggagcatgtgcaaaagttgacctgggatctgctgattgtggatgaggcgcacgagggggtggatacgtacagggcggatgtggcgttcgagcagattgcgcgtcgggcgacgctgcatctgtcggggacgccttttaaggctttggcaaatgaaaagttcgaggagaaggcgattttcaactggacctatgccgatgaacagtgcgccaagagggagtggcaggaggaggcggaggaggaaaatccctatgccgccttgccgcagttgcacctttatacgtaccggatgtctgaggtagtgcgcgatcgcctgaagcagggggctgattttgacgatgatggcgaaaatgaggcctatgcttttgacttgaatgagttttttgccacgaagagtgacggttcgtttaagtacgatgaggcggtggagaggtttttggaggctttggcagggcaggagaagtttcccttttcgacggaggctttgcgccgcgaggtgaagcatagtttctggctgttggaccgcgtggacagcgccaaggcgttggcgaagaagttgaaggcgcatcccgtcttccgcgagtacgaggtggtggtggcggctggcgatggcaagacggatgcggaggaggaggcgacatcgacgctcaagtccttggataaggtgcgcacggcgattcgcgcccacgagaggacgattacgctttccgtcgggcagttgacgacgggggtgacggtgccggagtggacggcggtcttgatgctgagcaatgtgaagagtccgtcgctgtatatgcaggcggcgttccgggcgcagaatccctgcctgttcgtggagggggacgagttgcggcgcaaggagaatgcgtatgtgtttgattttgacccggcgcggacgctggtgatttttgagcagttcgccaatgacctgtgttcggcgacggtgagtggcggaggcgatggggagacgcgcaaaaggcaggtgtgcgagttgctgaattttttccccgtctatggggaggatgaggagggggagatggtggctctggatgcggagaaggtgttgtccgtgccgcgtaagattcatgccgtcgaggtggtgcgccgtgggttcatgagcaatttcctgttccagaatatcgggaatattttctcggcgccgcgtcaggtggcggatatcctcgggcaactgccgacggtgaaggagcagaagccgtccaaggcgaaggtgggcggtcagggagagggcggtttgttggacggcgccgcggatttgcccctgaatgaaaagggtgaagtggtgttgcccttggatgaattgacccgtaagacaggggagcttttcggggataagatatacagcgacaatgttgtgacgcaaacgaagatcgatgaggtctcgacgagtaacgcgccggataagaaggccgcacaagatttagtgacgatattggtggatactgtggtgaaccccaccctgcaggatgccaagacgcactatggcgatgagatgagtagagcgtctgaacatcgtctcaaaaagcagttgcagaatcaggcgacggtcgcggtcggcaaggcagcgacgacgcacaagaagaatcgccacgagacggagaaggcaaagaaaagggctctcgacgaggcgcaagccaaggggcagagtgaggccgaggttcaggcgattcaggatcgttttgatgccgagcagagggagaatgagcgtcggtatcgagaggagttgaaggaggcagcggcagagattgagaagaaggccaaacaggctgtggtggatacagtggaaaccgagaaggttaccaggaagaaggaggcgattgaagaggatattcgcggtcatttgcgtggctttgcgcggacgatccccgcctttttgatggcgtatggcgacgagaatacctgtctggataatttcgatacgattcttcccgatgaggtctttagagaggtgacggggatttctttagagcagttccgcatcttgcgcgatgggtgcgattacgaagatgagggtgtccggaagcattttgacggtcattgttttgatccgattgtttttgatgatgccgttcaggagttcttggcgttgaagaagaaattaggcaattattttgatgagtcgcagtcggaggatattttcgattatattccgccgcaaaagacgaatcagattttcacgcccaagcatcttgtcatgaagatggtcgatatgttggaggaggagtctccgggctgtttcgatgaccccgacaagacgtttatcgacctctacatgaagtcgggtctatatgtggcggagattgtcaaacgccttttccgcagcgaggcgatgaaggcgcgtttcccgcaggcggaggagcgtttacggcatattttcgcgcatcaggtgtatggcttggcgccgacggagattatttaccgcattgcctgtgcctttgtcctgggcttcgacgaggagctgcgcatcgagcggcatcatctcgcgcgcttcgatgccttgccggcggtcaaagacggcacgctggaggaggctctggacaagatttgggagaggtgaccgtgatgacggcctggcttgggaggcttcatgtcttgcgccgctcccgttgaatgagtggcgcggcttaatttccggcatgtttctttgtgtttcatgtgcgcaagccgatgaaaattcatggttggcgtttcagccttttttcacggtcaggggtagtcccgccaccatgaagtagacttcatccgcgcttttggcaaggagttggttggcaatgcccagcccgtcgcagtagtggcgcgtttccgcatctgactggctgatgcccatgccggtttcagaagaaacaagcacccatggtacgggggcttggcggatgagctttttcaaagcttctatttcctcaatcagcgcttcctggaacggctcgtagtccgtggggtccttctgggcgtacagggtattggaggcgagcagggtgacgcattccagaatgacgccgtccacctggtccagcaagccggattccccgacggcagaagctacatgacggggacattccagcgtgagccagcttttaggacggcgttcctggtgcttgcgcacgcggtattccatggagccggctccgggccagacttccgccgtggcgacgtacaggatttttttcccgaatccggcggctatttgttcagcgtattggcttttgccgcttctgatgccgcccaggacgagcgtcatgcgtgcggtattggcgtcagtgtttggtgatgtagcgttcatgggattccagcatggcctggtgggagttcaggaagtcatccaggctgaagacttccagcgtaataaggggggagaaatgaaggtcccacatggggtgcagaatggcgtccagcgtagcggcaggcatgtggtgcagggatttgtggtcccgtttttccagcccgtgcaggtggcacatgcgtatgtccggcagccagagcggcagaagtttttccggccgcaggccttctttccagacatggcctatgtcaaagcaacgtgaatggggtgtagcggctaccagtttgtccagatagtcggtcggatggcgttccaaattttccagggccaggcattccggtgcggggaggtggggtgtgatttgttccagactccggaggattcgttccgttttgcgttccgtaagatgggggcgcatatcaggaccggggatatggtccgtgaccacatgcatgacccaggtgtggggctccagttcccgtgtcaggtcaatggcgcgaatgatgttttccgtataacggcggcttgattcttccgtggcgaagctgccgtccgtaggcaggtggacgttccaggtaaccccggcatctgcagcgattccggccagttcccgtatttccgcaggggtaatgagttcctttccgcattctccggcttccagcaggagcagagcgacatcatccgcgtaatggacgcattccctgatggagggcacgtagtagtccgggatgatgaaggaggtgcatccgatgttgaggcctggaacgcggcatttgtgtgaagttttcataaagtgcagaaggtgagcaggacaagccattccgtacattctacggtacagccgaatacatccccggtaacgccgcccaggcggcggcgcgcgtatagaagcaggcccatggagccggccagggcggagagcagggcgtacagcccgttccatcctgccagagcgcaggcagccagggtgacggctgcggcagccagggcgtgcccggggcgcgttccctgcttgaacgcttcccccatgcctccaggccgtgcgcccggaaagcgcatggcgatgaatatctggctgcgggcaagcaatcctgccagagcgcacgccgtgagcagaagttcccaggagccgtgggccgccagagtcgccagggcggctcccttgaacgccaggttgaaaaacagggccgtgccgccgaaggtccccaggcgggagtctttcatgatttccagcctgcgttcccgggatacttcaatgggaagcccgtctccgcagtccgctactccgtccaggtgcaggccgcctgtgacgactacccagcaggcacagccgataacgccgcagaccaggggggggaagagcagggttgccgtccaggtcaggccacccgcaagcccccccaccaccaggccaaccagcggtagccaggcggaaattccgttcaggtcattttgcagcggccacggccctacgggtagccgggtcaggaagccgaaggcggagcggatggtggtgatgacagccatggatacagggaagaaagggtcagcgcggaacggtgatgtccagttccggcagggttttcatttcagaaagtacgcgcgtggcggcgtccagcaggggaaagaacagggccgcccccgtgccttcccccaggcagaggcccaggtccatgtacatggtgacgccgatgtggtccataatgagcttatgccccggttccgcggagttgtgggagccgatgaagtattgcgccgcttccgggcgaatgccctgggcgatggccgcggccgccccggcaatgaagccgtcaatgacgatggggacgcgcagggaggccgcccccagcatcagtccggccatggctcctatttccggtcctcccaccttcgccagcacgtcaatggcatcggaagggtctggcttgttcagggcgattccctgttcgatgagttttatttttttgcggatgacttctcctctgacgccggaaccgcgtcccgtcacggtttccacaggggtgcctgtgagcacggccacgatggcggaagagggggtggtgttgccaatgcccatttctccggcggccacaatgtccagccctttgtttttttcttcacgggccatgtcaatgcccacttgcaggcatttcagggcctgttcccgcgtcatggccggccccctgctgaagtcgttggcgccgtgcatgacttttcttttgaccagccccggcaggtcgccgaagtcgtaattgacgcctacgtccactacggaaaggcgtgctcccgcgttgcgtgtaaaggcgttgatcgtgcctccgccctgaaggaagttgcgggtctggatgtaggtaacgtccgtggatgtcaggctgaggccgtggtcggcgatgtggtggtccgcggcgaacaggactatggctttgtccttcaggcgcggcgcgggattgccggtcatgccggcaatacggatggccacgggttccagttttcccagggcaaggggaggcttggccagaattttctgatgttccagggccgcttttgcggcctgttcgtccaacggggggatatgcagtttgttcatgatgtccagaagtggggggtgaagagaagaaggagagtgaacgccagcgtacccgtggcggcagtcgtccacatgagccgaatggccagggccaggtcgctggcggaggctttggttcgccctgttcctatccaggggtagtttgcaggaattcccttgtaagagaccgggcccccgagacggaggcccagcgctccagcgaaggccgcttcgctccatgcggaattggggctggcgtgggcgttccggaaggcccatcccatggtgagcgccctccgggcggaggttcctttcaccatcagggaggaaaaggaaatacacggtaaaataaggcgtgcggggatgaagttgagcgcgtcatccgtgcgtgcggcaaaggtgccgaagtgtttgtaccggtcattttttttcccccacatggcatccaggatgttgaaaacacgatgcgccagcgcggcggaagccgccccggaggcgcctcctgccaggcagcctgctgaggcccagaacagggtggaaaaaacgccatccgtcaagttctccgccacgctttcaatggccgctctggcgatgccgtagacgtccatccgttccgtatcccgtcccacgatcatggagacggagtgccgggcctctccggcgttcccgctgcgcagggcgttttccaccttccgggcatgctcggccaggctgcgcggggccatgcagatgtaaatgaccagaacggacggaatccagggtgcccagggggagggtaacagggaaaagggaaggaagagcgccgcgcagccgaaccatgcggcaatgcaggttgccagcgctgccgccattcccgcatgaaaagttcctccccacctttgcctcgccagtgtttccatgcggcgcgcgcaccggccgatcaaacagacgggatggaacctgttgggcggttctcccgccagaatatccagcaggaaggccgcaggcaggatgaacgggcacgggaacatgggtcagcgtttcagttggagagctcggtaaatggttttcaggtccagatgtttccggaccacgtccgccaggcggtccagcgctccgtccaggtcataggcggtgtgcagggctgggttggctttcagccctgaatctttcctgaccatgttgatgaatgcgcggcggaattggtctccgtccagcatgccgtgcagatacgtggcccagatacggcctttgccgtagccgcagggggagccgtcttcccggaacatgacgggggggctggattcttgatggctggtgacgccatggtggatttcataacctgcggcgggaacgggcagcggcgtgcttgcccggcgcacgttgatcagggttttggctgaagagaaggtggtggaaagttccagcagccccagtcctggcgtgcgctcctccggggattccatgtgcagcgggtccagaatgtccgtccccagcatttgcagccctccgcagacgcccagaagccactttcccttttcggcatgacggcggatgggttcttccagcccggcggaacggagagaagccaggtccgcagccacgcttttagtgccgggcagaatgaccaggtccggatttccccattcctcccgtgtccgcacctggcggagccggacgtccggctccgccgccagaggggcgaagtccgtgaagttggagacgtgggcgggcatgactacggccacatccaggcaatccgcatgtttcccgtgctccccgtggccagggggcagcgtggcgcggtcttcttccggaatgttgatgtcccgcatcatcgggatgacgcccagcacaggcttgcccgtacggttccgcatgtagctgtgcgccggggccagcagatccggatctcctcgaaatttgttgaccacgaaccccgccagcagttctttttcccacggggcgaatgtcatccacgttcccagaaaggaggcgtacactccgccacggtcaatgtccccggcgagcaggactctggcacgcgcgtagcgggccatgttcatgttgaccacgtctgctgatttcagattgatttctccggggcttccggccccttccaggcagaggagttcatattcgtccgccagggaatcgtatgctttgcatacgtccggccagaagcgccttttagccgtgaagtattcccgcgcgtccatgcggcctacggggcgccccatcacgatcacctgggagccggtattggaatggggcttgagaagaatggggttcattctggcatccggatcaatgcggcaggcctgggcctgcaccagctgggcgcggcccatttcctctcccagcgcagttacgccggagttgagagccatgttctgcgccttgaacggcgccacgtgatagccgtcctgaaggaaaatgcggcacagggctgccgtgagaacgctttttcctgcatcggagcaggtgccctgaatcatcagggccggtttgggagccttacggataatggaggggccgtttcccgccagttcggcgcgcagagcttccgccagcagggcgtgttcctccggcgtgcggacgccggagcgcaaccagccgctcgtttccagccccggataattggaacagtcgcgcagtgcgatgccgtattttttcaggagccgggctgccaggccatgaggcgcccccgccaggcggaagagaaggaagttggcctcggacgggagtacggcggagcccggcagggaggagagcctgcggaacaggtcgtcccggcgttcccggttccgggtgcgttccctgtctgcccaggaggagggctgtgccagcacggccttcaccgctgccgccgcaaaggcattcacgttccaggcgggcagggattgccgcagccgctccgcgagcggagcggcacagatggaaaaaccgcaccggacgccggccatgccgtaaaatttggtcagggagcgcagaaccaccaggttgggaaggagggccgcttcacggagcagtgattccgctccttgtacgtaatccatgaaagattcgtcaatgatccagaggacttcggggcggctctggacaaccctgtgcagggccgctgcgtccagcaggccgccggacggattgctgggatttgccagaaaaacagcgcttccgtctgcggcctgttcctccagacggcaaagagacgggaggaaggaatttcgttcctccgtccggatggaaagaacatccgtgccgtggcgcaggcaggccagcctgtattcggaaaaagcgggttccggaatgacggcctgtttaaggtttaatgcgcgcggaagagcgtgaatgagttcattggccccgtttccaaatacgaagcagccggaaggaagcccgtaatgaaccgccgccagttcccgtagatccgccgcatccggagaagggtagggtactgcgttttccatggccttccacaatgctgaaacgatgaactccggcataccttccggcctcaggttgacgctgaagtccaaaatatcccgttccgggcggcaggcctcctccgccagggattttaaatctccgccatgtgaaaaaacgttcatgccacagtaattggaaccggcgtaccgaagggctgcccgcgccggagaaaaaaaggaagcgccttgcaagttcggaattccacgtagccggaagcttcgccggagacgggaaatcttccctgttgcgggaacgtgggaacaaggagcgtcatgagcgcatcatgtcctgtatgcgccgggagtgacaagacaaaaatggaaagccccgtgaggaaaagagggatggagaacaatacgctgaaaagggaaaacgactgcaattcatctggatgttcaaagaaaaatttttttgtcttgtcataccggtctctttggtatttcatccgtcccatgaacccttatgggaagggttacagacctcagggacgtccgtagccgggcaggaaataaatggggaataccggtgtgagtccggagcggtaccgccactgtaagcgagcctgcctcgcaagccagaaaaccagcctgtgaggttgtccaactgttcggcgagttaccgaacgtaaggcactacaaccatgctttatacgaagaaagcccttcaaatgggcgcaattgctgttggccttgccgcattcgcaggccagtcctctcttgccgagtccgctaaaaaggaagactccaagccctccgtcaggacggaaaccatgcaggttatgccggaactgactatggcatcccactttgtgggcgtgccgtacaaccggtctggagtgtccgtttccatcatcaatccggaagaattccagaaggcgggcattgaaaccctgacgggagccctttcccagacgcccggcgttttcacgctggacggaggcggcacctggcagcgcggttccgtgagcaacaccgtcatccgcgggatgaacaaggatacctacactctgaccatggttgacggcatgcgcatcagtgatgccaacatgtccggcaacaagctgctgggcatcaccaatctctttacggtgggcaatgtggaagtggtgaaaggagcgcagggcgccgtttttggttccggcgccattggaggcgttgtcgcgatggatactccggagggggaaggcgatcccgtaaccaggatttttgcggaggccggttctttcggctctttcaacagctatgtcacttcctccggcaagatcaagaagctttcctattttgtaggcgttgggtttgaaactacggaaaacgatccgtcaatctatccggccatttatgacaacaggacaggcatgaacgatttccgccagtggcaggaagccgtgcgcctgggctatgatatcaatgacaaggtgaaggtgagctttacctatcgccgcctggattcctactttgaatatcccacgccgtatgtggattataaccagtggccttccgttccggatccccatctgtacaatacggaagacaagaaccgcagcaacctggtgacaggacgtgtggatgcggaaatttccaagctgtggtccaccagcttcatggtggggcattacaacatggactattcctgccatactcccggatttgatttccagcccaatgtgatgcgcaaccgccgttttcaggcggagtggcgtaatgcgctgacgtggaacaaggaatggaaaaccatcgccggcatggcctgggaccgttccgactacatgagcgaaaacaattacgttgccaaggatgaatggcagagcacgcttgccttctttgcggagcaaatgtggtcacccacggacagctttgacgccagcgtggccctgcgcctggaacatgattccgtctggaacaatcattttacgtggcgttattccaattcctggaaagtgacgggcaaggattcccccacccgtattttcggttccgtgggttccggtttccgcgcgcccacctattttgagcagtatgcggccaattatggttatgttggcaaccctgatctggatgtgtccaagtccctgggcggcgatctgggggtggaacagcgtctggcggacggccattatgcttccgtgacgggcttctggacccgtatcgacgatgaaatcggcaccatgagcgtaggcacctggccgaactcctataccacttacaccaattattcccactgcacttcctacggcgtggaagtggcgttcaagggacagttcaaggacgcgtggaacagcggctattatgccaattacaccttcacgatgcccaagcgcgattccatcggcaaatacgaaaccattcagatggccaataccgcccgccacaccatcaacgcagaggtttatacctccccggttgaaaagctgacggtcggcttcggcgtaacggccgccatgggacgcacggattacaattatgcccgtctggacaatttctttacggcgcgcctgtttgcccgttaccaggcaacggacaatgtgtccctccatgtgcgtctggaaaacctgtttgaccagaagttcatcatgacgaatgattataacttcggcccgcgtgaagcccgtggattcggaatcttcggcggtgtgacggtcgaattctaagttcctttcaatattaattgttgattgctcccccatcttccgtcttgcggactgtttcaggcgaagtgaacggttccgcgcggaagatgggttttctgttttccgtagtttccggaatcggttaacatgtggcggccatctgagttgtgttgcgctggatatccatactgggggcattggccctttccgtctttctgggaggtgtcttttacttttcccagcgtgagaagaatgtttggcatgaattttccggccggatggacggcagggggatgcctgccgtatttgacggttttgtggaacgctggaacagggccgtggaacgggagctgcgccgtgaattggctgaaggggagaggaaggaaaaacttctggtcgtttcccgcggggaaggggacggccggcgtttggcggaacaggctcgttccgtggaacgcatcaggaaaaggctgttattgaaagaccatatccgccttcttcctctggaagacgttccggacggattggaatggcaaaccggaatggaagagccggatgtgggtgatccgcgcgccgtcaagggtggaagagtccggttgtggatcaatactccgtttcccggaactttgcgtgctttcgggccgggaagtgaaaattttttcaattactccgccattgacaacgtgtggcttcccctcgtggggcttcatccggaaaccttccgtcccattccgggcctggcggaccgctgggccttgtccgcagacggaaaaactgttttttatcatctggatccggaagcggcctattcggacggacgcatcgtgaaagcgcaggattttctgctgaacatttgcctccgtacgtccggttttgcccgggatccgttctggacaaccctgttccgttccatgtatgatcagattacggtatacggggattccatcattgccctgacgctgccgtcccgcgggccgctgctgccttacatggcctgtgcggattttcatccggcccatcccggtttttaccatgatttcaacgctctgtttctggaacgctaccagtggaaagtccctccaaatacgggtggctacatggttgttcccgctaaaatccggataggagaaagcattaccctggcccgcgtgaaaaattggtgggcgaaggacaggaagtattaccgccattcctgcaatgcggaccaggtggaacatgtgtttgtgaacatggaaaacaaggcggttgaaatgttccgccgcggggaactggacatcatgaacgttcgcaagccggaggtgtgggaaacgggtctggaactgccggaagtgcaccggggctatatagataaatacagtctggaagccaattacgcctgtcccccgtacggactgtatctgaattgctcggacaaactgttgaaaaatccggatatccgccgcgggctggcgcattccgtgaacatgggcctggtgattgatactttgttccgcgggaatatgagaaggctcggttcctacatggaggggtacggagacctgactcttccgctgaaagctccggaatacagcaagaaaaaagccatggaatattttgcccgcgccggctaccgggaaatggggactgacggcgtgctgaaaaatgaacggggagaacggctggtggtggaactgacgtttgcggattcatccgtcctgatgaccaacgtctgttccattctccggcaggaggccctgaagtgcggggtggacctgcgtctggattctcttacctacagtgtctgttcccgtaaggtttttgaaaaacggtatcaggcggctctgtgggcgtggccgctgcagacgccgttcccacggctgtatgaaacattttcttccgaactggcgtatgatgcccgcggaaatcccgtaggcaatacgaataatattatggctgtgtcggacgctgaactggatgccgccctggatgcggaacgcaatgccccggataccggttccctgaagctgactcttcaccgtgcccagcagcgtctttatgaactttgcgtctggattcccggctggagggaaccatacacgcatgtcgcctgctggcgctggatacgctggccggaatctcccacccggttctgttcccccagaatttacaatccgctggaatcgcacctgtactgggtggatgaagaaatgaagaaggaaacgctggaggctcggagccgtggcgtaccgtttgaagaaaagcatcaaataatatatcttgaaagacaggatggtgccgttccgtaataaaaccgggtcaccgtctcctttttaaattgaaaggaggtgatttttcatcataatctccttcgcatttaccgtaattaattattaattccataatcatgaaattatcctttttctccgttctgcttctggcagggcatctttgcgtggctgctcccatgcctctgccggaatccaatgacggagccaggcatgtcttctctactaatcaggaaaattttttgatggacggaaagcccatcaaaatcatttccggggaaatgcattatcctcgcgtgccgcgccaacactggaaggacaggttccagcgcataaaggccatgggcatgaataccgtctgcacttatctgttctggaacgtgcacgaaccggaacccggcaaatgggacttctccggcaatctggattttgtggaattcatcaaggaagcgcagaaggccggcctgtgggtcattgtgcgtcccgggccctatgtgtgcgcggaatgggaattcggcggatttcccggctggctgctgaaggatgaagatttgaaagtccgttcccaggatccccgcttcctggaaccggccatggcttatcttaaaaaagtctgttccatgttggaacctctgcagattaccaagggaggccccatcatcatggcccaggtggaaaatgaatatggttcctatggttctgacaaggattacgtgaaaaagcatctggacgttatccggaaggaacttccgggagttgttcccttcacgtcggacggcccgaacgactggatgattaagaacggcacgcttccgggcgttgttcccgccatgaatttcggcggcggagccaagggcgcctttgcgaatctggagaagcacaagggtaaaacgccccgcatcaacggcgaattctgggtgggctggtttgaccactggggcaagcccaagaatggcggcagtacggaaggtttcaaccgagacctgaagtggatgctggaaaataacgtctcccccaacctcttcatggtgcatggggggacctccttcggcttcatgaacggggcgaactgggaaggcgcctatacgccggatgtaaccaattacgactacggcgcccccatttccgaaaacggaaccctgacggaccgctaccgcaccttccgccagactattcaggattattacggtgatacgtacaagcttcccgaacctcccgcccagccggaaatgatggagctgccccccatcacgtttacggaaacggccggcatgttttcccgtcttcctcagccctccatccgcaaggagcccgtccacatggaagccctggggcaaagcctgggtttcatcctgtaccggacaaaggtgcaaggaccggtgaaaggagaactgaagatgaacaacatgcaggaccgcgccatcgtttacgtggatggcaagaggcagggggcggcggatcgccgttacaagcaggattcctgtgatgtggtgattccttccggacttcatacggtggacatttttgtggaaaacatgggccgcatcaacttcggcggccagatacagggcgagcgcaagggcatccgagggcccatcacgctggacggcaaaaagctggaaaacttccttatctacaacttcccgtgcaagggagtggagcttcttcccttctccggcaagaagccggcgggcgaccagcccgtgttccaccgcgggtatttcaacgtttccaatcccaaggatacctacctggatatgcgggacggctggaagaaaggcgttgtgtgggtgaatggacgcaatctgggccgcttctggtttatcggctcccagcaggctctttattgccccggagaatacctgaagcctgggaaaaatgaaatcgtggtgctggacgtggacggaggtttcggcacggtgaagggtgtgaaggaagccatttatgaagtcaacagggaccccgccatggcggatgtcttccgcgtaggcaaacctgtggcccccgctgccggccagctggtgcacaagggttccttcgccaagggggcagatcagcaggaaatcaaattccgcgctcccgtccaggcccgttacatcgccattgtcagtaaaaacgcccatgacaacggcccccatgccgctattgcggagctgaacttcctggatgcctccggcaacctgcttccccgcgaacagtggtccgtggtttatgcggattcccatgaaacgacgggggaagccgcccaggcgggcctggtgatggacaaccagcccaccacctactggcataccaagtggcagggggacaaccctcagcatccgcacatgatcgtgctggatctgggcaaggtgcagaaactttcaggattccgctacctgccgcgccagaacagggaaaacggccgcatcaaggactatgaagtctatgcgtctcccaagccgttcaagcctgccaagtaaggttctctgaattgttgaacttttcagggccgcttcctccaggatgagggggcggccttgttgcgtccggacatcccggaagaaacagttctcctttgcccggataagagccgttccggtttaaagatgcgtatcagctttccgtccctttgtttcctgctgttgtgcgggccggtattccatgcgcaaaaaaggcggttccgcagtataacggagccgccggaagaccgtaataaacctgataattgtttgttagaaattccaggagaagcccagcttgatggtgtggtagccggggtcattgtagccctgaatctggtaatattcgtagccgagcacgaagtccgcgctattggagatgctgaacttgaagccggcctgggcagcccaggaaaacttggtggaggaaatggttcgggaacggctgccgtcttccagtccatgaatggtggtcttcacgtcgccgtaagtggcgccgactttgccgcccagatagaacatggtgtagtcgccgatgggaaggttcagcgtgtaaccggccatcatcgggatataggtggaacggaggctggcggtataaggcccgctgatgcccaggtcctgcacgctggggtggtgggaaccggccaggatgccgccgttcagggaaatctgatgaacaatgctgccggtttcaatatagttgaaaatgctcagattgccgccggccacgttgggcatggcgtctttggtggcgattccgtaagccccttccagggacatgccgaactggccgtcgtacttgtcggcatgataggcgctggcggaagacacggaggccgcaagggccaaacctaacagtatagttttgttcatatggggataaatggtgaatttaactgtggtccattcttggcagttttctcttttgaagtcaaacatgaaatgtcaaatggacgcgaaatcctcaaacccggggagatgaagttgccagaacgctcccggtggggtacattctgcgccatggaacaacaagcgtgtgatttgttggtgaccgctttccgcatgctgggcggagcggaacagtccagcgctgccggagatgcggccgtcgccgttcgggacgggaaaattctggaaacgggaagcgccgcagaactggaagccaggtggacgccctccgttcgcagggatttggggaatgcgctgctgatgccggggttgattaatgcccatacgcatgtccccatgacctttttgcgcggttttgcggatgacttgccgctgatggaatggctgaccgggcatattttcccggtggaagcccggctgacggataaaatcgtctccctgggggcccggctgggcatgtatgaaatgatgcggacgggcaccacggcgtttgtagattcctacctgttggaggccaatgtcctccaggaagcggaacgcatgggaatgcgctgtgttggcggggaagtcgtttttgcttttccctctccggcatacggggggtgggatggtgcggaagccctgtaccgggagcaggcggaacgcttttccggccgcggcagggtgcaggtggccctgatgccgcacagcgtgtacactaccagtgacgaagtgctccggcgttccatgaagctggcggaggaactggatatgatgctgcatatccatctgtccgaatccgccggggaagtggagcagtgccgttccctgcacggaggaaggcgccccgtgggctatgcccgcgatatggggctgctgaatgaacgcgccgtgctggctcatatggtggacgtgacggatgaggaactggagctggtggccgcttccggggcggcggttgtccataacccggtcagcaacctgaaactggcgtccggcttcgcccgcgtgcgggatatggtgcaggccggcgttcccgtctctctgggaacggacggagcgtgcagcaacaacagtctggatatgtttgaaacaatgaagctggccgctattcttgccaaggggtacagcggtgacgctactgcgctccccgccatgcaggcgctgaagatggctacggcggagggcgcccgcattttccggacgccggggctgggaacactggtcccgggggctcccgcggatatgatcgcgctgaacctggatgaaccgaacctgtgcccgatgttcaacgaaacgtcccatgccgtttatgcctcttccggcaaggattgcgtgttcaccatggtggaagggagaattttgtatgatcatggaatttacacggacggcctgtatgcggataccgccgcggaaatgcgggatctggtaaagtgggtgaaaaacagtgattaagtattggaaatgagcgaataaaggcaggttttcaacacatgctttaatcacccttcccttacctctgctatctgtcggcctcccgaaccggcgcatgctcatattccttctttacccgcatggggggatgcctttatagtaatttcatgcaatatgatctcatcgtcattggtggaggccctgccggctatgtgggcgccatccgcgccgcccagctggggaaatccgtggtgtgcgtggaacgcgagcgggtagggggcacctgtctgaactggggttgcatccccaccaaggcgcttctgaaaaacgcggaagcctacctgactgtaacggcccgtaccagggaatttggcatgacggtggagggcgtcagcgtggattggagtgaagtgatcggccgttcccgcaaggtcagcgaccgcctggccggcggcgtggggttcctcttcaagaaaaacaaggtggattccgttacgggggaagcttccatcatttctcccggcagggtggaagtaaagtccgccgacgggacggtgactgttctggatggaaagaatatcctggtctgtaccggctgcgtcacccgcacggtgcccagcctccccctgaacggcactactgtcatcggctccagggaagccatggtgctggaaaagcggcctgaaagcatgatcatcatcggttccggagccatcggcacggaattcgcctacatttacaattcattcggcaccagagtgacgcttattgaagcgcttccccggatgcttcccaatgaagacgacgactcctgcatgacgctggaacgggcattcaaaaagcagggcatcaaagtgatgacgggagcttccgtggaatccgttacggaaacctgtgacggacaggtcagggccagcgtaaaaaacagcaagggacaggaagaggaaatcacggcggatgtctgcctggtagccatcggcgtgaagccggttgttcccgccgctcccggcctggacctggagctgacggaaaagggattcatcaaggtgaatgaccgctacgcgacttcccttcccggcgtgtatgcggcaggcgatgtgatcggcggcgtgctgctggcgcatacggcttcttttgaagctgtgcaggcagtagagggcatgtttaatccggactatcagcccaggcaggtgggctttttcccgagctgcacatattgctacccgcaggtggcttccgtaggtaaaacggaacgcgccctcaaagaggcgggcgtggaatacaaggtggggaaattccccttccaggccattggcaaggctgtagccgccggagaaccggacggtttcgtaaaaaccctgtacggcgccaaaaacggagaactcctgggcgcccacatcgtggggccggaagccacggagctgattgccgcgctgggcatcggcattcaggcggaactgacggacgaggacatccatgccaccattttcgcccatcccacgctgtctgaggccatccatgaatccatgctggcttccgagggaatcgccatccacatgtaacggttttcaatggaagggcccccatccggggctcttccattcattcctttgtcatgcaaacgggtgaatgacaatctgcgttgaaaaaagacgttcaaggataaacttgttgatgagggctgcagcgtcaacaattcccgtaagtttatcagacaggctttaagcaggattgatagtcaatgtagtagattgactgtaagttttggaaagccgcggtttgcttgtttatatcatcaaagaacggggataacctggaaaccacaggcaacagggccatttgcggcacgagtggacggacagccgcgaaaacggagcgggagtaagccaaaacggctcatgccgcattgaagtacggaaaagaaagggcaaaaagattttggaaacagttccgaaacagttccgcttcagcctctgttttcgttttttatttgcgtgatgaatgggaagtgtttgatactaatttatggggaaaatatatttataacgtatagataattcctcgcatttatttcttctccaatattttctgttttctctttaccgggtgtctgatgacagttttcagtttgcccacatcacatttgcgtggatcggaaagataaatttcgtgatgataacgagtatcggtaatatcgatctcatatccattggcatttgcgtattcttccatctggtggatggtttcgggttcgttatcataagagccgaggtgcatgcattgaacgcaatcgccttcttcataggtaagaaaatccaccgttgaaaagtccttctttttctttttggttgcttcctcgattgcccactcaagatcttccttagtcacaaagtctggtaaacggataatagaaataaatttaaaattttctttatggccatagtccattccatcgctgccattttgccaccaaaagccttcaagaggcgggacaatatactcaaaaaagcctttaatcttgcgagaactcttatagctcattttgatagtataggcaattccgtaaagtagttcaatggagcgttggtattctccaccctcatcattgggatttcccttgccacgaactgctatgtaattcattttaggaatagtaacgattgccggtttgttcttcggcatgtaaaattccttgtattctttcttataatcaaaaaccatgcttaacactcattgaaattattttttttcttattatgccatttatgaatttttagaatcataaagggaaaatcggaagtaaataaaagactgagcgcaacagacgaaattttttgaaaatacagcggttttagagtgattgattttttaattgcgatttgctgattagttcaatcgattcgaatatggcacatttctctgttacaaataatccgtgttttatatatgctttaactatccagttcgtcaagaggagggtagtattttttataaagagtttgaagaatccccctccctaaaaattttccccttcccttgaaaagcgcctcttgacaaaagacctgggggattcatttcctgaatacttggaaaattaaaaaagatatttgtttttttcttcttgttatttagactttttccctgcggctcctcataactcgaatactggattttccacggcatttttgacggcaacgagaaattgcacggcctgcttgccgtccaccaggcggtggtcgtaggaaagggcgaggtacatcatgggccggacgacgatttggccgtcccggaccacggggcgttcctgaatggcatgcatgcccagaatgccgctttggggagggttcagaatcggggtggaaagaagcgatccatacgtgccgccgttggaaatggtaaagcatccgccttgcagatcctgcatggacaggtttccgctacgtgctttttccgtcaggacggcgagttcctgttccagttccggaaacgttttccggtcacagtcccgcagcacggggacgacgaggcccttatccgtgccaatggctacagagatgtcatagtacaggttttccacgatgtccgcgccgtcaattctggcgttgacctggggcacttcctgcaaggccttgactactgccttgataaagaagctcatgaaaccaagcttggttccgtgccgttcccggaattctgcatggaattgtttgcggagttccatcacggaggacatgtcgcattcgttgaaggtagtcaggatggccgcctggtgctgggcctctaccaaccgtgccgcgatggtacggcgcaacgggctcatgggttttctgatgaagcgcggagaagcctcctttcctgttttcccattttttccggaggttgtctgatccggtgaggatgttttcttttccggcttttgttccggggcgccagtcacaggtgaggagggaccggaagcgggtttctcccgcgtttccagtggtacggagggcggtgcggcggaacttccgtcaaggggggaaatgcggcctaaaaccgcgccgatgggggcttccgccccttccgggacgaggatttccagcacgccgctttcatccacctccaaatccgtggaaaccttgtccgtttccagcgtcaccagcgtatcgcctttggctaccggatcgccggcgttcttgtgccacgcggctacggtggcggaggtgacggattctccaaagttgggagtcaggatgtcgctcatgggaggaagatgggttcaggattgcgcccgcggcccgaaggcagcggcgagaagtcttttttgcgcggcggcgtgcagggccttggctccttccgcagggcaggccatgggcggccgtcccgcatagcggaaggaggtggcgaagaggtgccccagcctgttccgcaggtggccccaggcccccatgttggagggttcctcctggcaccagacgaagtcgcgcactttctggtagggtgccagcaggaaggtgagctgttcccgggccagaggatagatttgttccagacggatgattaccgtgtctgcaatattccgttccttccggcaggcggccaggtcataataaactttcccggtgcagaagacggcgcgcgtcacctgatccggcgcgggagcgtccgggtccggcagtacttcgcggaaacgggagggggccagaaattcccggtgcggggagacggcatccggacgggagagcaggcttttgggcgtaaagacgatcaggggcttgtgcagatttcggtgcacctggcggcgcagggcgtggaagtattgggccggggtggtggggttgatgacctgcatgttgtcgtccgcgcaaagctggagatagcgttccatgcgggcgctggagtgttccgagcccgccccttcatagccgtggggcagcagcagcaccatgcggtttttctggcgccatttggcctccgcggccgcaatgaactggtccacaataacctgtgctccgttggcgaagtccccgaactgggcctcccacatgaccagagcgtccgggctgtccagtgcgtagccgtattcaaagcccagcacggaggcttccgacagagaggagttgtaaatgcggaacgcggtagtgccgtggttcagctttttcagaggagtgtacagggagccgtcattgaagtcatgcaggacggcgtgccgctgggagaaggtgccgcgctgacagtcctggccggacaggcgcacggtgtggttttccgcgagcaggctgccccaggccagggattccgccatggcccagtccagcggtccgccttcccggaaggcctccctgcggcgagccaggaagcgtttttccagcgtggggtgaggcgtgaagccgtccggcagttccgtaaggatatttccgatgcgctggaacaactccgggctgattcccgtccgtatgctggtacgcgggatgggcgtttcatccgcatcctgcgcggtggcgggcaggaggtagtccgcggaattttccttcatttgcaggtaggcctgttccatgccctcccaaaggtctttcctgatgtcccgctcctgctgttccgtcaattccccgcgttccctgagcgccgttccgtacagggctgcggcggtgggacgcgcctcaatccgcttggtctgcatgggtgcagtaaaggcggcctgatccgtttcattgtggcccagacggcggtaacagtacatgtccagaatgatgtcccttccgaatttctggcggaactggagcgcgaagtccgccgcccacaccaggtcttccgggctttctccgttgatatgcaggatgggagactggagcatctgggccacgtccgtggcgtagcgggaggagcgggcttcgtccgggccggtggtgaagccgatctggttgttgatgacgaggtgcacggtgccgcccgtgcggtagcctttcagcagggaaagattgagcacttccgccacgattccctgcccagagaaagcggcgtctccgtgcaggacgagcggcagcacatgcttgcgttccgcgtcttgcaggttgtgctgcatggccctggctctgccttccaccacgggatacacggcttccagatggctggggttggaggagaggcggatgtggaggtcatgcccgtccacgtggcgcgtggcggcgtagccgaggtggtatttgacgtcgctcctgccgatgggggattccggaaggtagtccggcgtgaattcgtggaagatggttttcagcggtttgtggaggatgttggcgagcacattcagccttccgcggtgggccatgcccatttcaatgtgggagactccggcggcgggacagcgcttgatcatggcgtccagcaggacgatggctccttcccctccttccagggagaagcgtttttcccccatgaagcgcttgcccaggaattcctcaaacagttccgccctgcagagatggaagaaggcttctctccggacttccgggccataatccacgccgtttgcccggagctggattttttcttcaatccaggagcggattcccagattgtctatgtggtggtattcaaagccgatggctccacaatagattttttgcagccgattgatgatttcacggagcgtgagtgtccctccgtccatgaaggtgccgatgttgacgggctggtccagatcctcttcttggaatcccatatcctccggggtgacggggaatcggggccggttcggcggctccagcggattgaagcgggcgcattggtgtcccatgacccggtaggcccggatgagctggctgatgcgcccgcggccttccgcgctttccggaggaacggtgtaaagggacgtgtccgcatcggtccctgtgttttcttttttcccgggggcttctccgctccccagttcgtagccctcgaaccaggctgcccagagaggatctacggacaggggatcgtttttccatgattgatggagcgccgtaattttctctggagggagtttggagaagatggaggcatgcatgcggcagagcggatggtacggggcgttttcagttctctgatcgctatttttgcccgcagggcgtcaataactgtgttcgttgagctgaacttttccacggaagacccagtaaatggcggcggaataagccagaacgagcggcacgcccatgatggctatgtatgtcatcacgaccaggctttcccgcgtggatgagccgttgacgagcgtcagggagtgttccgggttgggcatggagtaaagcaggttggggaacatcgctgtcccgaagagagccatcatgcagcccatggtggagcaggaggcgacgaaggcccagcccggacggttcctgtggatgaagagccagatggacgcgatggaaatgaccgccagggcggcgatgccgtaaatccagggggagcgttccagggccgccgctacgtgcggaacatacagcagggtggcagccccgtgcaggatgatcaggacagtgaagatgatgacgcagggtctgagcagtttcctgatttgttcctgaaggctgccctgggttttcatcagcaggtagattcccccgtgcatggagaacagggcgaccgtcgtcagccccagaagaacggaataaggattcagcaggctgaggaatgttccggtgaagtttccctgcgcatccagaggaatgcctttggtaacgttccccatggctacgccgatgagcagggccgccagaagactgctgatggagaaggtggcatcccatcccctgcgccaccatttcatgggctgcttgcttctgaattcaatggacacggcgcggaagataagggtgagcagcaggagcatgaaggccaggtaaaatccggagaagacggaagcgtacacgtacggaaaggcggcgaagagggcgcctccgcccgtgatgagccagacttcgtttccgtcccatacggggcccacggcatttagtgtgagtcttctgttttcatcgcccttgatgaaaagctgaagggcgccggttcccaggtcaaagccgtccagaatggcgtatccggagaaaagcacgccgacgaggatgaaccagatgatttgcaggtctgcgagagtgagattgtccaacatggttttaaaagaggggtgaaggttagtctttgacaaaaggaacctggagtttgccttccccggcgccgtcgtcttcgtcagtttcctggtccggacctttgtggattttatgggtgatttgatagaggaagagggccagcagcagggcataaatgataaagaacatacccagggaggaaagggcttccgccgcggtgagggtgggggatacggcgtgttccgttctcaggatgccgtacacaatccatggctggcgccccagttccgctacggcccagcccgcttggttggctatttgcgggcccagtacggagaaaacgaagcaccagagcagccagcgcttctggaagagccagcctcttttccacccccacagggccgccagaaacagggccgccagggcgcagccaatcaggatcatgagatggaaggagtaaaagacgggcaggatgggaggtcgttcgtcctgcgggatgtcgttcatgccggtgatggacgtgtccaggtcatgatgagtcaggagggtgagcaagtacgggatggagattcccgtcacttcatgggtggacgggttcatccagccgatgagatggaggtcctgtggggcgccggattccatgacgccttccatagccgcgaatttggcgggctggtggatggagacttctcgtgcgctggaatctcccgtgatgcccatgccagccacgccgatgaggccgatgaccaatgccaccttgaagcttttttccgatccaccggtaaaacgttttttcaaaatataccaggcggagacgctgaggacgagcgtggctcccgccagccagcagccggcgagcgcgtgcgtcaggcggtccacggtggacggattgaagaccacgtcatagaagctggttatatgggcctggatttttccgtttacttccaccagcttgtatccggcgggcgtctgcatccaggagttggccacaataatccagatggcgctgaaatgggcgccaagagcgaccatgcaggaggaaagaaagtgcattttggggcccaccttgtcccagccgaaaagaagaatggccaggaagcctgattccagaaagaaggcgaagattccttccgccgccaggggactgccgaagatgtcgcctacgcagcgggaataatccgcccagttggtgccgaactggaattccatcacgatgccggaggctacgccaagggcgaagatgataccgaagattctggtccagaatttggcctgcttgtggtagaggtcattcttcgttttcagccacaggccttccagggcgaccagaaccacccccaggccgatggtcatcggcgggaagatgtagtggaacataatcgtgatggcgaattggagacgggataataagaccggatcgtccatgattgattggggatgagtggatgtttatggaacaggaggacggcagccaaataccgataccttcatactttatacattccaaaagaccctttgttcaattattttccttttccgtggataacttttttagattacgtctaaaaaagaatggcttaacactggatgaacacgtccatcccttcgtccgccagagcaaaaagagccatcatgtccctgggagaaaggcgtatgcagccatgggaagccggggtgcccagcagtttcgtatcgttggtgccgtggatgtaaatatagcggctccgggtattggcgttgtgcggttccagtccgtccagccacagaatgcgggtcaggatgaagtcggaatgttcatccatacttttcgggattgcggtgggatagcggccagccggaaggcgtgagatgaaaatagtgtcctccggttctccgtccccgatttttttgcagatgcggaaatgacctgtgggggttttcccggaaccttcttcatggcctgtacctgccttcccgctggaaacggggcattggagcaggatttttccggatttttccagcaccagttcctggcaggacagattaatgcgtatggaaggggaagccatgacgggggaaggagtcaaagaggttgctactcctgttgctccatccgggcaatgatggcctggatggcggttgtcaattgccgcgctacattgttgtaggctgtctgtccgcagccgatggggtcggcgatgccacggttgcccgtgtagcaggtgaccagcctgaccttgtccgcatgttcggggaaattggcaagcagggcggcaaggtggctttccgtcatggcgtagacatctgtggcgtttttcatcagttcatccgtaacagggcggctttcatggctggagagattgacgccatgctcccggaggacgtggagcgtttccggactggctgcctgcccgggccatgcggctgttcctgcggaaccggcctgccattccggatggtgcgcggaaagtttccggaacaggccttccgccatggggctgcggcaggtgttgccggtgcagatgaagaggatgtgtttgcgctgtgtcatgagtcggggcgttctcttttggagtgatgggggataggtacttcgttgggttcctgatacaagttgtccgggggcagcacatggccggcgccgctgccttccgacgaggggggggcgtcgtcttcttcatcttcatcctctgcatcgcgggaggggggggaaagctgggggaacagactgcacgccagggctacgcacagtaccgccgttatgggagtcatgacggggaaccatgtatcatgagcggaaaacaggtaccatgcaatgaagggaacgaacaggatacagaggccccaggtgatgaagcgccctctgcgttgaaaacgcaaagcccatacggacagaagcaggacgtccagcacgatgatccattgtacccaggcgggggctatgggaatcaggacggcaggggcaggggcaagcgctcccatgatgctgcggacagtttgcgccgccagaagggattgcgcgtccggcgtgtcggaaagggcggatggttcggaaacgagtaccgcatccgcagaggaaagcagttttctgacggcagtagtatccggcggacgcaggccggacatgacggggacgatcacttccttcgtgtccagaatggtggggctgctgtttgccgccagggggatgcggccgtttttatccagaggaatggagcgtttgccgcccagaaaaagggtgtctcccggaatgattctgacatcactgggtttcaggtccagggcattcagagcggccaccagaggaagagtgggaatgatatccccgccccagcggatgaaaagcggcggggagaccctgttttccggagctggggaaaacagctcgttattttccacgacggttcccagggagggggctgacgtggttatttgcggaggttcccctacgaacctgtccgcgcgcgggaactggtccgtctttcctacgatgttggaagcgggaataatcaagtctttccaatccggcggaaggggcgagcggcgggcggattcgctcatttgccggcccagagccttgtggaggaagcggtccagttcataccccacggcggctttgacaatgctgtccggcttttcttcccaggtcatgggggacatcacgtaaacattcctggctccctgttcatacaggtgccggaacagcactgtgtaatccatgggattgggaggataggaggcgaaactgttcagtgatgattcccggtgcagggaaaccacgggaagctgggccgtctgccctttgttgaagtaatcgtagggctggaggacgatgctgttttccgtattcagcccttccgggcgaacagtccggtattccccagccagcaaatgttccgctgcctgttcataacagaaaatggtaggaggaagaagcacataccccagaatccagcccagccccagggaaatctggaacagggacaggataagcaggaatttggggggaagcgtcatcagaggggctgggaaaaatcatgctagcatagcagccagcggttctgcaagcgtggagccgggcagaagcttccgcaggtgtcccagcccggcgggaatctgagccagataccaggtttttccctggttgtggccgatattggcgtaagcacccagcatctgcataatccgctgcagggcgcaggcacggaaaatacggtgatctatggagtgagcggagatattttcccactccctgagcaattcatccgcctgttccggttccagacgggcgtagccgtcatagaccagggaggccagatcatattccggacggccgccgcgcatgccctgaaaatcaatcagccaggtttttcccgcgtggatatgcacgttctgggactggctgtcccggtggacggggcattccggaagggccgacagaaactgcgcctgctctttcagggcgggatggttcaggaaggaagccggttccaaccccaggtgggatcccaggaaatgttcagcaaaataggactgctcccagcggtacaaggcctcgtcaaaagcgggctggaggggaaattcctccggaaacgggcaggagtgaagcagatggagttgttccatagcccggatgtagcgcaggcgcagggaaggccagggttctttccggaaagccagcaggttggcgtctcccaggtcttccaccaaggcggctccgcatccgggaccgagaggttcataatcgtaaatttccggcacgttgacaccgtgggcgtgcagatgccgggctgcggggataaaagaatcattgtccgcacggtcatttccccactggatgccgatgcatgtgcggccgccaaaatggatgcggacgatcgtacggccggaggctcccaaagccaggggacggaaatcttcctgacgcggaataatgtgaaaactccggtgaaccagacgggacaattctttcatggaaaggtggcgtggctgcgttaagagccttgcgtaaggatggcgtatgaaggatgacggcacccttcatacgccgaaaatgaggaaaggcagggcaatcaggcggggaactggtggtcttccccatagccgtaatgctccacgacgtaatccacatccttgtctccgcggccggagcagtttaccagaatggcgcctcctctgttttcccgtgcccacttcatggcatacgcgatagcgtgggagctttccagagcgggaatgatcccctcgtaacgggaaagtttgaagaaggcgtccacggcttcctcgtctgtggcggtgacatagttaacgcggccgatgtcgtgcagataggcgtgttccggccctacggaaggataatccaggccgctggctacggaatggaccggtcccggattgccgtcttcatcctggagcatgatgctttcaaaaccgtgcaggacgcccttgcgtccataggtgatggaggcggaatggtccccaagcctggaacctttgccgaggggttctacgccatagatatccagcgggtctcccaggaaggcggtaaacatgcccatggaattgctgccgccgcccacgcaggcgcagacggcgtccggcagaagtcccgtcatttccaggaattgttcccgggcttccacgccgatgcacatttggaaatcgcgcaccatttgcgggaaagggtgggggcctaccacggaaccgatgcagtaaatggaatcctgataactgttcaggtaagattcaaaggcggaatccacagcttccttcaaactttggaggccgtgcgtgacaggcaccaccttggcacccaggattttcatgcgggtgacgttcggagcctgcttggcaatatctaccgctcccatgtgaatttcgcattccaggccgaagaaggcggcggctgtagccagcgccacgccatgctgtcctgcgcccgtttccgcgataatgcgcttcttgcccatgtatttggccagaaggccttcccccatgcaatggttgagcttatgggcgcctgtatggttcaaatcttccctcttcaggtaaatttgagaggtgcccaggtggcgggaaaggcgttcgcagtggtaaaccggggtgggacgtccctgaaactgtttgcggatgcgccgcaattcattaatgaactgggcggagtgggctatcgtctggtaggcttccgtaatttcttcaaaagcgggaaccagctcgtccggcaggtaaacgccgccgtattcgccaaaacggccctgggcgtctggaaaattgcgtaaataagtatggagatccatggtctgttgcgttcgtgactgccagtatttagcacgatgccacaattcaggcaaaaacaatctccccggaagcccttttaaaaaagaaaggaaagaaaaaggacttccccgcaacaggggaacggtttctccgggagagaccgggaggaaaaatcggaaatcaggccaaacggcgctttctgatggattttccggtatcggcaagcgtctggcgtgcgtccggatccgctccggccatcaaggctgccagatcccgaacgatgttctggcgcatgcgagctaccagatcgcgcccttcctgggtgatggcgaccatgattttgcggcggtctttggctgcgctcatgcgtttcaggtagcccatttcctgtaatttatccaccatgccggtagcggccgcggtagaatgccccattttctgggcaatgctggacatgctcagaaaatcttcgctggccagataagtcagcaggaaaaactgggggtaggaaaccttgccctcattcaattctgaagaaaggttcagaatgcaggaacgttgcgtgaacaggatgaaatccgccagcttgtttgcttcttcggaaatggagctcatgatcgttgtgaatgtatgggagggttgatagcgatacccgtccggagactcgccggcggttcggccaacctaccgccgcgtccttctacgggcaagtcaaaaatataaatttttattaaaattttacatttgcggataataagcattttgatggtatttgaaatacaatatgttgactgttaatagaatggatatattctgaatatagaatgtgaataacatgttaaaaatagatataagctattgataaactgtagtttttcacaaaacttccgggaatccgcagcaaatctggcataaagaggcgttgcagcatgacaagcctggattgaagagggctcttgtgcagaggcttttcatgggaaataaagccttgccggaggaaaattttatacagcgggaagcaatattttcctgcccttgagacggacttggaacttctgcagtcttgacgtgagagtagagaaagggggcgttgaaaactttctttcatggcctccttcctgccgcgatagttgcggttccttgtttacggcggtatgagtctatgacgcttgtaaaggcaggaaaaacctttttaaacggtcctggaaggaggggaaaagaacaaacggaaacctgccccatactgatggagcaagcgccgttacagacccggtttgggaatgacgctctgcttttgggagagaaaaattgcttcttccccaaaagtcaaaggctggcggaagtaataggggaaaatgctcaaggagccggaaaaagactgccggggttctaagaggttacctgcaaaactcctattatccggaacggcctattttgaaaatagtccagcggcagtgaaagggccgggcgcatcaaccgcattaataaatgctccattacagatgacgcatcattggttatcggcacggtgtgtaaaagagcaattgcgccgtccatgttcatattctgaaggtctgttatcaaatgttcacgaccatggaacttagagccgttaccattacatttcaatgatatcggtttgctggggatgcgtggttcattaattttttcagcatttattgtttacgagtggttcttatgtcattcctcgctattccgcacaacggaaaattttgtgatccgtcggcctgtttcctgaaaaataagaaagacggcgttgcttgccgtcccagctgccgccatacagcaaatccagctgcttgcagcattgcaggcagaaaatcatggaataaaacattactgtcggcaacatcattgcatgccgccaaccttatgcttgtatccgcaagatattttattcccccgccattctccggtaaattttttctggaactcttttccggagaatggacggagaacaatagcaacaactagttggcgggaggcggcgtaaaggtgcgggctgacatatccttgtccagaaccagcattccctgtccttctcccttaatcatgcgtaatttgctgatgatgtccttgacggtttcttcctcttccacctgttcggtgacaaaccattgcaggaaaatatccgtggcgaaatcccgttcttccttggcaagatgcaccagctcgttgattcggcgagtaacttcctgttcgtgggacagcgtttcttcaaaaatttcaagaatattggaccagtttgcatccggagcgtctatggaaagcattgtaacctggcctccgcgggaaagaaggaaatcataaaatttcagcgcatgagcggtttcttcctgatattgaatgcgcatccagtgggaaaaacctgtcagaccggcatcctgcagataggcggacatggccaggtaaaggttggctgaatacatttcccatttgatttgctcattaagagcagttgccattgttgtactgatcatattgtaaaatcctgttgatttttcccacttctacaaaacaaagtccgcaggatcaagataatcctgcggactgtatgacgggaagggggggaagggaaggcgtcaggcttttgcggaaacctcctccggaatattattttcagggagttcttccgccggaacggaggggaattctttagtttccgtaaccacgctgttttcttcagatgcttcctcccgggcggctgccgcctcggaagaagaggcggccttctgtttttctggtgcagcggagtccgttgccggcgcgtcctggcccttctcttccggtttccgtttttccttgggagccttcttgggagaaggagcttgagcggagacggttcttggacggctgacagtgttattggagaaaacaaggatgtagccctgttcggacagccagagcagatcacgaaccaaattctgctgtttttccatggcctgggctacttcttcttctgtggccttttcctgttccgggactggggccagctctttaagcatggcatcgacgcctttgccgggattattggccgcccaggtggcaatggacatcagggaatctgataagacggtgccttcttccatggccttggggcgtgccgggccggtgtaatggttgcctttccacttgaaaataggcatatgatgtcgggctaacccgtggcaaaggttgggaatcagcatgctgggatggcggcgggtggtgccggataattggatcaggtgcgcccacagaccgggggagaggtgattctttttcacggctccgttgacgaacaccttgtccgtaacgtcatagcactcgtcaaagtggttggattcgaaatcctgttctaccgcggcgggagattccagaagcacttcggaggctccttcccgaacgggcttccaggcggtgcgtttggaaacggcttcctgccatgcctggacagcttcttcgctcttgtccgtcacaatcttggaacggaaagcctcaaaagtcatgttggcaaatttggtgcgatgcaggttcatcagggcggactggtagccgtgccaattaacgggacctatcagctcgttgtttaaggaacatttggcaatggctttgaaatctccttttggagcttccacttcctgttctacggattcgtaatatttgggcatccaggtggactgccagaggtgtttgacggcctcctgtcgggaaataaagcaggcgccgtcgccatgcttgcaatggtacagatccgggccgttttcctgcttcatgaataccaggtcataacggtcgtaggaacccatgaccaccttggcaagatccagcagggaaatggtgcggcggtgtttctgtacttcctggtgcagggccgccaggccggaatccacggggcgcagctccacgcgcaggccttccgtcggttcctccatggcggagcggggagtttgatcgcggcggttgcggaaggagccgcgcgtgcggtcttcccggttaaaccttctttcgccgctttgaccgtcaacacgacgttccccccggggctgacggccttcacggttgtcgcgccgcggtcggcggtcgcctccctgcctgtctccggacctgcgttccgggtaggatacaggccgttcctgacgggctcccggtctcgcccaggccggaccaaattgaaagtcggccaagccggaaaggtccggaatctgctgcttggggtctgtggaaggagtttcgtcggtcatcatgtacgggttgtttcaatagcaactaaatgaggtggatggcaatcattttacgtgcaaacagaccgaaaattgttcaaaatgtcatgaaaggcatctggaaatgcaactatttctggtgtatcctttcaactcaacttctgtcaaatgctctatatggataaaatacgtcaacgactttccgaccttggttacgccatttacgatgctcccgttcccgtaggctcctatgtgcaatgcgtacgcacgggcaacctgcttcacctctccggcggcatttccgtgaacggggacgacaaatactttggcaaagtagggcaggagctgacggtggaagaaggtcaggccgctgcgcgcgccgctattttgaatcgtctggccgttattgtgcaggcggtggggtctctggaaaaagtatcccgaatcgtggccgtgaacggatttgtaaatgccggcccggatttttatgaccatcctaaagtattgaatggcgcatccgatctgctggtggaagcctttggagaaattggccgccacagccgtacggcggtaggcgtatccgccctgccgctcaatgtagcggtggaaatcagcatggtggtggaagttcgtgattaatattaaaaaccggaagggattcgtgcttgaatcccggcggcattcctgtagagtgccgtccggtcaatgcccccgtggcggaatggtagacgctgcagacttaaaatctgttgtccgcaaggacgtaccggttcgagtccggtcgggggtacttctttaaataacagtaaattatgtaaattaaaggctcgtttttggcgggccttttttgttttcaaatacgctgaatttacccctttttgcttgtatctccggtcaaaaatagttacccagtagttacccgagatggaagagaaacggaaaaagaaagctgcccctttgacgcctgtaaaagatgttcccgtgaaaaaatggggaaagcctgctggcgcctttcgattcccgcctccttttcggaatccggaaagagggaacagcggttttatccctcctataaaaaagcattggcggcggccggggaaatcaagctcggaaaagtggctgtggatgccgggattgttgaattaacccaagctcaggcggtagaagctttatctgcgctggatattttggaaggctccggaatagggttggtggatgcttgccgactcgtgaaaagaatgcaggaatccgggataggagatatagccgaaatagagcatgctttcaagttgggagccgcacagatacggcatgaaaagaagtctccttcctggagtgaagccgcttgggaaatggttcgtgtgaaggaaaaaatcacaaggcggcgtgagcgtaccttgcagcaaattcggtatatgattcgtcgcatggaaaaacgatgtcccgatttttgtgtgcgccccattggaggcattacaggcgaggaatgccgtgcggcgtttggcagggctttcgattcaccgattcagcaggataaagcgagagtagtcttttccggcgtctggacgctcgcaatgaagcgtggatgggctctttccaatccgacccgcatgcttgatgcgttaaagacgcaggagcgggaaatcagggcattgacgcctgaagaagtagaacggttgttgctcgcttgccgaccgcctttgccggatgattcttcccagttggatttgacatccgttcagcctgccgtggcgatactcgtttttgccggcattcgcccggaagaactgatgcggttaacgtgggaagacgtatctttcgaggatggtgttattactgtcagggctgctgcttccaaaacagggggagcaaggcatgtgacgatctgcgaggctttgcgggcatggttgtccctggtcccagagaaggaacgcaagggtgctattattccggaatattggcgctcccggtgggaagcggtgaggagtcgggcggggtgggggaagaaaaagccttggcctaaagatgtgttacgtcacacctttgccagttaccacgcgaaaacctatgcagactttggaaagctccaaatggaaatggggcaccgttccgccgaacttctacgtaatagatacaccaatatggcgggacttaccggagagatggcgaaacagttttggaagttgaaaccaagtttaggtaatcaaatttaatagaaaaggatcatgtttcccagtcttgaggagttggggtatccgattgacttcttaattcttttctatgttgtaattcttgagccatttgctcttcctgcctttgaatacatttattttgcataatagtttcttcaagcttctcaaaagcaaaaagcacataaatgtattgcacgaaacaggccaaaagcattgagcaagataaggataatacaaaatttccaaaaatataactttgaagaatagtctttgttgagaaaaacaagaagattgatgtaagaaaacttaacaaaacaaggtttgtcaaagtacaacttgttttccccatattttctttcacctgctctggagaaaatccctgctcaacgagcttaatggaatagtcgagtgctttaagccgtagattatacgaagaggcagagaggatggcagaaagcccagctagcagtttcaaaacatttggagtgttgggccagtatgtgatcactgaaaaacctgtacacgataatacaccgaaaacaactacaccaccaaaaataggaaaccatgtagcaatctgagtgcgcaatactccatctttcaatccctgcctgatggatgtcatctcaacgaataatattttcttccaactgtgacgtcaaccattttgatacggattgcatggcgtttatttgactaattactccattcttaaagagaattggaattttcccgcagggcaataacttatctttattgattttttgcccgtttttcaaaattacagacaggttatctaaatcagtatctgttgctcgtttagcaagctttcggatggattccaaatcgtggttcttttttgaccccgaggaaatgattacctgaactcggcaatcatctagggatggaggtggtattacatgaatgattggagaagccggacaagttaaagattttttcacttcataaccaatttctccgcaagtctggttcggtttatagtcaagttgaaccgtttttactccgtactttttaatagattcctgaatatcaatgcgaacgtcattgcttaattctatgatcgtggatataggtaaaaggtgtgttctactctgcaagatccaagagaagaatttttttaggcgaatatctccattaccggtatctgcaacataagccagatggttgcctgagaccgcaaagataactattttttcgacaggatcggcagatacacctttttctgtgacgggttctgcgttagtgataaatacaccagcatctgaaactcctttggctggaacatgtttaccttcctgtgttaaaaaagttactccacatttgcatgctccgtatttggctaatttcatatacggagcagaaaattcctctataatgtctgagttgccattgtagggcctattaataccagaactgccatccagtttatcaaatgcttcatctagaagattctccagagttttgccatgcaactgtgtgaacaagtctgctactatttcacatttacggtaatgaactgttctgttttttgactcgttttgttcagctgtcataaaactataattaaaatacaatatttataaatcctctaattttctttgtatatcttctaaagaacggttcatttcctctgttcgcctatcttcctcttttctattttccaattttagcattgcttttttgacctcttcttctttccctttctgtttaacctttaataaccacttttccgcttcttcataatttttatcaatcccgtcactattcatgaggtgttcggcaaggcaaatagccgcatctgcatgaccttgttccgctgcttttttataccaatgcaatgctttttctttatttttaggcaacgacgaaccaaaatcagttccgatttcgtatgcaaatgctacccaatattgagattctgcgtgtccttgttccgctgcctttttgtaccatttgaatgcctcgtcgtcatcctttcgaattcctattcctttggaataatgccatcctaaacagtattgagctctcgcatgattttgatttgcggcttttttgtaccatgatacagaccgaggtgcattttgctccacttcttccccatcataatatacgtctccaagtagacattgggcttcgggatctcctttagatgctttgatataaagttcttttaacttaggagtattaagttcttcagggatgctgtttttcttaggaacagattttgctttctttactctgttttgaacaattttttccgcagtattattttctgcaggttggataattgattttcctacgaatatgccaacacctcccccaataagtaagcatgcaccgccaacaataagatagtttttaataaggtttagggtactcacgtttctgtcagacatagtaggctggtgaagttattatttcgaggctccgccacaaatcttgcagttcacaccgctgggcgtatcgctggctcgccctttgcaagcccggtagtaccggcagtttttgttatgggtcttgcccgttgagctgatccagtacgctttttcttccgctgttggcttggctgccggtttccggtggtaatgatattcccccgttttgcggttgtagtgaccgccgttggcgtccaagccgccagggtgcgcctccgagaatgaagtgagggaaataacagctaaaatgagagagaatagtttcatgcaaattcataataccatgaaataaagagagttgtaaataatttgcttaactctttcaaaagcattatgaaaggattatttccaacatttatttacatgtttcacctgtagtttatcgttgtttgttagagggggccgtggaggaaggtattacattaataagaacgggaataagacgtatatcaaaagaaaataaaagccccctggcccggaggccaaggggcgaagcattctaacgaaagagactgcatgatagcctcttttctcagaataagcaactcctaaatcattttttcagtatcatcatgtaaaaatgtgtactggaattgttattaaaggagggggggctttgttcaataaaaaggagttgtcccgatagaggcaactcctgaatggagtcggggtctgttaatcttcccaagttccacctgcagcttcaatagcatcccgtacctgagctataaggtagtagggggcattgttattatcgtggccagggatagtcaccgtctgtccatgaggatgatcgtatacacgatgggaaccccgtccttgcccttgctgcagaatgaacccagcatctcgtaaccgtctgattaaatctcgtattcgcataagtgatgttgaagatacgagaagagaggagagtttcaatgaacgctgtctgaatggaaaaatcagcctttttaatagtctagattgctcggaagagatgattaccctttatttattcaaattattttaccaggaaggataataagaccgttatccactatttttttaggaagaagctttctatatggaaagcttcccataggagtatcatgaaatacttcattttctattttgaagtaattaggagatatataagaatttactatttttatttctggtttttcaatattttctaactgtaattgcttgtaccattcttgaacgtagttaacattatgtggaaacctgactccaaggacaattccagatagatattgcaatatttctgaaaaaaatatattcccttcatcatctgttgatgatgcatgttttattaaacataataggcgcatttctttttcaaaaaaccaagatttatcctttgttatcattaaatcttctatgacttttggattaaaaaaagggaatacatcaggaaaaacaactctatttttcttatataaaacattatataagcaattatgtaaaaaatcttcatgcaatttttctattctccaatgattgtaatttggctcgttgtgcggtgttacaggtaatgagaaaaccagacacactcctttatgcttatctgcgtaatgtccccacatcgcagcagatgatacggatcttgaaaaacaaattacttgatgagaggaatgtttagtataatcattatatgtttttttggctggcaaaaattcaaaaatatcatttgttctataaggatttgttccttttattcgccattctctgagtatttttttcgcaatttcccaaggctgataaatataaagatcaacaactttgggattcataaattgcaataaagtttcttcatgttctctagaaggagcttccccatcttccacccatttatctacatccttctctgaaagacaaaaattatgggctatccactttttatctctatttgagaattttaaccattcttttattttttcagaatatgcagaattaaccatgactgtttttgaaaaaaattaaataataaaaaccattctttttagccgatattttattgatgaatacaagtacaatatcaatatactttatatgttattgttcaatttttttgaatcaagctttctcccacctgtctagggtttccacatagatgccggagattttgccgccgtccatcggttcgatgtctccgaagttggggttgatgggatggagggtgtattccattttaccggtttccgggtttttcttacggaccagttttttgagcgtcaccccgcgttcatcatggtattgaacaatggttccaggtttggggatgggggggatggtgtattttttcatgatgaccacggagccgtccgggatggagggttccatagagtgaccgttgacgcgcagcaggtattcccctttttccagttcacggtatagccggatgtcctgcggaatggtgtctccatccgccaggttgccggcggcaatgttgccgatgattcgtccctgagcctccaagggaggggctgtgaatgtttctaccggggtaaacttcttgcgggcagcctctttttctttggcggcattttgaatggcggtattgacgaattccaggaaggtttctttgtgggctttagcagcctcacagatgatgtcccattcttcatctgtgaagtctatgacgatgcggggagaggattcggcttctccgttcattagtttttggagctgaagaactgcataagcagggaatgcccctccgggagcaagccagttgtctatggttcttttaggcgtgttgagtttccctgaaagccaaaagcgatccttacctatagttttgagccatttttttacgtcttctttagtcggcgtcatacgttgattttacgcacatttcatgaaaagtcaacctattgattagaaaatatcacgcataaaacatgaaatgcgtgttgacgtgttcatgatttttacgtaaaaagatttcatcaactacgagagatcatgaaaacagaaatcgacttagacaaattgccggacggctgcaagagccatctgctggccgaagcggaagaagggttgaagccttcggaggctattattcgcatcattgaacgagaatcattccgcaggggattccgtgttcacttgaccacgccccgcgatcttccccgcccgaagaaccccaagaagcctgcagcctaatggaagaagacctgatcgaagaatttatccggctcggctggcacgagctttaacccgccccctgaacaacaatggaaaaaatgacgaacgaacaatactggttgcgccgcgaccgcaccgagaaaatggaatccctttacggccgcccgataggctttccggaagacgaactcaacccccggcccggtatcgtacagaaccttgtcttttccgctctgctggttgggatctccacgattgtttattttatttacattaacattaagtaattatgaaccaagaccataggttgcctgaacaagtggtcagagacatttcaaaaggattagctgatgtcctgtctcaatcatggcctaaaaacgccgatgccacatttgccggttcacctcaaatcaacatcaatatcactgctcccccgttgccgtcccggctgataaggctctccaagtttgcacaatgcggactatttgccaaaggttctgaaccgagccgggccatgttggaaagcgccgacggtaaaaaactgctcccgattgtcaagtgtggcggagtgctttacgtggacctgaatcgggttacaaccgccattattgaacaactctctgatacaactaccggaaagcgctaccgcaaaaccggctcgttcaatgcaaatctctaactacctgaaaaaagatggccggggccagcaggaactgacacccgacctgaatacaatcaaacaagacaataatatgagcctattacaaaacatcaagcgcggagtgcagcagcgtccgcagcgtgtcatcatctacgggccggaaggcgtgggaaaatccacgctggcggccgggctgcccgctcctgttctgctggacacggaacagggatcttcccacatcgacgttgcccggctggactgccggagctacggagacgtgatcaatgcgatagaagaattgacgcagggcgggcacgaattccggacggtcatcattgattccatagactggtgcgagcgtttgtttgtgaacgccttcatcagggaacacaataagcgggccaacgcctccctgaaatccattgaagattttggatacggcaaggggtacaagatgatcgaacctgtagccatggacctcttgacacgcctcaacgcattaatgggggcgggtatgaatgtggtgctggtgggacactcccgccgcgtcaaatttgaaatgccggaaacagccggcgcctacgacaaacacgaactgaacctctccaaatttgtcgcgccgctggtcaaggaatgggctgacgccatgctcttctgcaatttcgtcgtaacggtccaggacggcaagggacatggaggaaaccaacgcatggtctacacctctccttccgccccgtgggaagccaaaaaccggcacgggatgcccgcggtgatggcgatggacgccggggaaatctcacgcctgctgtttggagcgggctgcggatctgccaatgccccggcgaatgatgcccctgcggcaaacaatggacaggcgccgcctccggccgcatccgcgggagatcgtcaggcggatgccctagccgcggtgattgaccacgcaaaagacgccctcgccttcatgatcagccgcggaatcattactgccggacaagggctggaagaagtcccggcggaatatgccgcccggattttgaaaactcccgcccggttcaataactccgtaaaagaattcatggaaggaggggcgtgccgatgaaacccgtcacctgcatcaacgtcgcccgcgaaaccgggcatgccgtcctctccctggacggagcggaatacgccgtcagcctggacgacctgcaaaaaatcctcgctgacattgccgggccccgtccggccccggccacggaactattgaggccgtccctgctccccaagctggcgcaatgcccctgctacgtctcctcccccgacgcgggagaagcggcccagcggggaacccggatggacgccgccttccgggccctgctcatgggcgtggacgaattcagggcgtgtgaacacctgaaagccgatgaaaaagaatccatcctctgggcggtgaaaacggttcggacgctctgctccggggaagaagtcattgccgacaaaaaccgctgcgccttcccgcaatggcacccccgcgtgacaggcggggaagcggactgcctctgtcccgcgctcggcaaactcttcgacctcaaaagcggccaaatccgcaactactgggaacagcaggcctcttacgcgaaatccttcatggaacgggaattcctggatgaaatcacctgccacctcctctactgcgaccagcagcaaatcgtcacccggaaattcacctaccgggaagccatctccatcgtcaacggagtggtggacgccgtggaccgcggcggcgggccgcgcctctgcgactactgcggctggtgcgcctcgcaggacacctgcccgctgcggaaccgggcggcgcaggaaatgctgaccctggcggaagccggaacgctggaagcgagcttcgccgaaatcgcggaaaacccgtccaggctggcggaattcgtcaccaaggcggctgtgctggaaagttacgtcaaaaagggaaaagaaaaaatcctcgactacctcaacaacggcacggaagtccccggattcaggcgcgtctcccggaaaggcacggacaccgtcgctccggaagacgtcgccaaatacgccacctggattggcgtcccgaaactcctgaaatcctatggcccgctcaaggcggacatcttccgcgccttgttcgcggaagcattgccggaacaacaattcccggaagaactggtcaggacgggggccggctcctcctacgttaaaaaaatctccgtctccaaaaccgcaaccaccaaataaccattatgttcagttacatatcagaaggcgagcccagcgaatacggatttctccccgcgggcgtctacgaaggaaaaatcgtcaaaatggaagaaggaatctcccaaggcgccaaaacgcggggatgcccgcagctggccgtccacatcagagccttcggccctgaaggggcggcgacggtccgttactacctgaccgcctcgaaagacctggcctggaaaatcgacctgttcgtcaaaaacgtcaccgggaacgtctaccaacccggccagcaggtcatcatcaacccggcggaatacctcggcaaaccctgctacgtccggctcagcgtcagacagggagacaagcccagggcggacgggacttatcccgaattcagcaactgcgaagacgtgctggggccggacgaagcccgggccatcatggcggctcaggacagggcagcggcagggcgcggcggagcgtccctgcctccgcgcccggcggacctgccggccaacaaccacatgagcgccacggcgggaccgccggcggaagaagacgaaatccccttctaatcaacagccatgaacaactgtgtactgggtcttgatctgtcgctaaccgctacagggtgggctctggtgtgggatggttcccctaaatggggcgtcatcaaatccaggaacaggagcgttaaacgtctctctgaaatccgcaatgcggtgctggacatcatcaaccaaacacagccttcccttgctgttattgaggggtattcctatggatcttcccagggcatggccgggctggcggaattgggcggcgttattcgcctcctgctcctggacatgggaatacctttcatcgttgttgcacctgccaccaataagaaatttgcaacggggaagggcaatgcggaaaaggatttgatgctcaaacgcgtttttcagcattgggcggcggatatgagcaataataacgaggcggacgcttttgccctggcccagtttggccgctgctacctcaaccaggagggcttttgtgattatcaaacaaaaaccgttgaaacctacaaaagaaaggaactcggaaaatgagcccggaagaaagagagaaaaaacggctctggatggaggaatacaaccgcagaagaaaagcctctgtcaccaaaaccgcacaggccgatctggatgacctcaacgccatttgcggcacctgcttccggatcggacagcaaataacggctatgggcgttagaggcaccgtttccggtgctctgaaaggcgggtatctcctggttaagcacaagaagagaacttaccacattaacccacatgacgcctaccccgtgatcaacctgtccggcaccgtcacttttgacgactggaccatgggtccgaacggaaaacttaaaatcaagaaaggataaattaaaatgaacaatgtctattgcgataaacccggccatggcgcttacccgctccgggcttgtgaaaaagacgggaaaatttttgtggacatggattcttgcacggaatgcggtccgcagaaaatggaagaagaagaggtatatcagtcctttttggatagactgcgtatcctttccaatcagctggacagcctgaaatgggatctggacggattaaaggatgatagcgagtcattaaaggatgacgtggatgaactgattaaagactatgaaaaagaaaacgcctaaatgccctctttgcggcacacctttgaaagccatacgaggatatgatgtccatgggataacaaccgattgggttgctggttgctacaactgcttcttccagagttcccatttttggaaaaccaagaaagcgtgcattgaagatatggataggcttgtttctttgtttcctcccatcatgagggtctggccgggggacaagctcgtgtatagtggcagtatttatcccgttacgattgtctctcaagaccttgatttatgcaaaataaccgttcgcgactacgcaggagactctttcatcatttactgtgatgaggtggagcaatggccgtgggagattgagcagaaaggaggaagcaatgatatttgatattgcgcaacttatagttgttttagtatccattttctcatttgggtattacctctatttagcgggccaatacaaaggatttcttaaagcgattgaagtctacttaaaatatgaggaaaaagaaaatgaaaatgacgcctgaacagaaagctttttttgagtacggggaactgtttcagctctggaaggatgcccgtaggtgtgtcttctggcatgaagagtcccatgaagatatacgccgggaaatagtccaaaaggtctggcagaagcgggccgagtgtagggcgtgggtgccgctggaacgaagagagtgcaagacttgccgttatttaggatacaactgccctcatactgactgcatccccggcattcatcttgaggatttttgctactgggagccgagaaaggagggagaatgaacaggtatcaccgaaaatggcttcggatatttcgtcgccgtgaaaatgcgtttctccgtcgcgttttctttagggacggagagcatgaacatggaaaaaggtatgagaccatgcgaaaagcggcccgaagacttaatgcgctccgcatgaggcatgtatggaataagccgtggattcctattgatgacaaggggagggctctgaaatacacggcggacgccgcgggggagaacacggatgtgaatccgcataactcgctggaaaacgcacccgcccaggtgggggaaaccctggcggacggaaaggagggggaatgaaagccattcttgacgcctgctgcggctcccgcatgttctggtttgaccgccgccatcctgacgtggtgttcatggaccgccgggaggaaacgcacacgctttgcgacgggcgaaccctggaaatcaagccggacgtcgtcggagacttccgggccatgcctttcagcgacggggcgtttcgccttgtcgtgttcgaccctccgcacctgattcacgccggggaatcgtcctggctggccaagaaatacggaaaactggacagggagacttggcaggaggatttgaaggccggattccaggagtgtttccgggttttggaaccgggcggcgttctggtgttcaaatggtgtgaggatcaggtcagcacggcagaagtgttgaagctggccagccatgaacctttgttcggacaccgccgcgggaagaccgtcttcctggtctttatgaaatctacaacccccaactgacacttttttgatatgccaaatagaataatcagagaagggattttaaccagcgaagcggttaattctctgagctgggaagcggaggtatttttccgccgcttgctctccgttgtagacgactttggacgttttgacgcccgttcgtctgttctacgctctgccctgtaccccttgaaactcgactccatgagggaggattccgttcaacgttgcctcaaatcctgtgaggcagcccggctcgtcgtcctgtactccatcgagggaaaagaatatctggaagtgaccaacttccggcaacaggtacggagcaagaaaagcaaataccctgcgcctgatgcacatatgcgcagcacatgcttagcagatgcgcagcatatgcacactaagacggagtcggagacgaagacgaataataccccctctaccccccttccgtgcaccgtggaagaagtcgaagaccatcttcgggccgcggcctttgcggggcgtgtgcgtttaacccccgaccagataccggactgcgccacagcctactggggaagccgggatgccgtcaactggacccgcaacggcatccccgtgaccaaatggcaatccgacgccatcagcttcgccacctcctacgccgtcaatcatccggtacagccgggaacagacaaagacccttacagcaaccttgaagaactttaacaatcaacaatttcaaaaaatatgatcgactctcaaacactcattgacgctgaaaaactggtgctctcccaggcaatggacggctcccaggcctttgcggacctccgggacaagggcatcagccgccagacattcagcctcccggcgcaccagcaaatctggaccgccctggaaaccgtcgccggcacgggaggaaccgtggacgccctcaccgtcatcgcccgccttgaagcccagggccagcttgacgccgtgggagggcacgccggagtcgtggagacggccacctacggagcccttgcccggtacaaaaccgccgccgccctggaaatggtcacggaagctgccaaaaaacatgcgctgctcgcgtttgcctcccggatggcggaagccgccggcgatcagctcaaaagcgcggaagaagcccttgatgaagccgagcgcggcatgtccgccctgcgggaccggtgcggcgtccgccaaaccgaaaccatccgcggagccgtgggaaccatcattgaaaacctgcaatggcgcatgaacaaccccggcgccatcaaaggaatatcctccggataccgccgcctggacctgaccctggacggcctgcagcccggcgccatgatcgtgcttgccgcccggcccggagtcgggaaaaccgccgccctggtcaacatcctcaccaacatctgccttgagggaacccccgtgggcatgttcagcctggaaatgccgaaatcccagctcctggaacgcatcctctacggcatggccggcatcaactccgacgacatccgccgcggcaagccgatgacggtcggacagcagcagcatttcacggccgccgtcaggaaaatcacggccgccccgctgcacatcgacgacgaaagctccctcaccatcgacagcatcagagcccggggccgccggatggtccgggaacacggcgtcaaatgcatcggcgtggactacctgcagctggtgcgctccacgacccagcaggcccggggaagccgggaacgggaagtctcggaaatctccgccggcctcaaatccctggccaaggaactcaatattcccgtcctggtgctggcccagctcaaccgcgacgtggaaaaaagagccgggaacgcccagggcaaaccggtcgtttccgacctgcgcgactccggctccattgagcaggacgccgaccagatcatcatgatccaccgcccctacatgtacaagcccgacaagcacgaccccacggaagcgcagtggatcatcggcaaaaaccgcttcggacggctggggcgtattcaattccgctggaccgcggaactcacaaaatacgaggaagaacagaattatcccgtcaccaacaaatgagaccccccaaaccatccctgcgaaaaaacaagccgacgcggcgaggaaagcccggatcctacaaactgcgcttaacgcttctggtggatcccagaaagaaaggcaaacttgtcgagctgggacttggtactaacgacagacaggaagccgaagaacgcgccaacagcattatcaatgctctggaatccgccggactctaccgtcttcccgccgtccgcattctggaacatcacgtagcccaatttggcaagattgaacctcccccctttgaacatccagaattgcctctatggtaacacccctggaaaaattcctggcaaaacatcccacaccctccggcatggattcaaaggaatgggctgctctgaacgctgccatgaaggaaaacaagtttttctcttccaaggtggagaatatcagattgctggaacggctgcacaggttgattaagaattatctgacaggagaaaaggagactttacccaatggggaaacggttatcaaggtaggaagcgccgcggacttttccaaccaggcacttcaatggctccaaaccgaggggcttgttccaccggacgccgaaggcccgaagtatcacaacgatattaaaaacatcggtgctctggcccgtctgaagctcattttcaagaccaacgtccggcaaagcattggggctgctcaatgggaggcatccatgaaaccggccaatctcaaagcatggtctgctttccggttcatccgctttccgggagccaagacaaagcggcttgttcatgtcgtcaacgaagatgctgtccggcttaaaaccgactttactttttgggcagacgaaatgaacgccgccagcctcgggggctttgaggtcccctggccgccgttcggcttcaactcctacatggatcaggagcctgtttcccgggaagaatgcgaacggctgggactactcaaacccggggagccgttgaagcgtccaaggggtgcggagcgcttcgggattgacctgattgaacggtacgggtacggcaagaaggccagtacggcgaagttgccggaggaactgagggccaaattgaaaaaggtctatgaagaccgctggggagtcaaacaggacaaatctgatgaggttgtctttccctcacaggaagtggcgaaaaaggccagggaaacggcggagaaagtcatcaaggttccctctgctcccattcctgcgccagtctcagccgtcacgcacacggtcagcctgggagatgtccccaaggtgaagatgcctgccccgttgacggataaggaagctgatgaccttttgcgaagcgttaccggggaagtgtgggcaaaggcatccagactggaaaagaacgctttgttttcctacaccggaaatggatatgcccgcatcaacaacgatttgaggaaggggaagtccaacgccaaggcgaaacagatcgccaaagtcattgacagatgcaaagtgcctcaagacatggttgttttccgtggctgtggggtttacaaggaattgaaagacgctttgaactggaaaggagaagaaataacagacgagctggttgatatgctcaatctctccgtagtgggaaaccctctcaaagacgaaggtttcatgtctgctgccgtagcggaggggaaaggattcatgaaccgtcccgtgttgttcagaattctcctgaagaagaaaacccgtgccatttatgcagagcccttttccagattcggggcaggggccggtaaggactgggacggccttagcccgcaaacctattttagcagtgaagatgaaatcatcatccagaagggaggaaccctcaaatttctccaattccataatcagaacgggaaattgatcattgactgtgaattgatacaataatgatatgaaagaagaaacatcaccagcgcacaagagaatttgggagtctgatttcaaaggatgcaaaacatcccaccctctcctgatgaaatgccttttgtgctccaagaagaagctcaacccgggtagtatggaatgtagcgcttatgagcgtaaacctgatagtatcctctacgataacgcggactgccccagctttgaacgctgtattgacgcggaagggctgcgctggattgaaggatatgtgaaactctccggaaaggcgtacgttccccgccaggacgatatacctccggcagggtgggaaaaaatcaacaaggagtatgcgaaatgaagaaagagaggaccgggaagaagggaaatgtttccaggtatagcgctgccctctctgaacgcatttgcggtcatatacgttgcggggatagtctgaggaaggctgccgaaaaggaaggcattccccatcccacggtgatgaattgggccagagagaacgcggattttgcaaaccaatacgcgcgcgcgtgcgaggaacggcttgccgccctagaagacaagttgcttgaccttgtggagaaagggcatgaagtggccccacgtgccgaaatagggggaaccatgttgcaggcggtcaagttggaaatagacacactcaaatggatgcttgccaagctgatgccgaagaagtacggagaccgtgcggcgttggctctggaaggtggagaaaaaaacgtagaggtgacccataaacttccagcagaagcaatcgttccgttagtgacagccttgagagaaatatggtccgaagaggaagaaagctaggggctccggtcaggccggaagactctcccgtcatctttgccgccctgattctgggggaaacagggctgtacaaatggcagatgcgggcccttgaaagggctgcccggggaaagcgggttgccctgcgcgctgctaatggttccggcaagacggacaaggtaattggtatccttgccctatggtttctctggcgctacccccgtgggcgtatgcctattacgtccggctcatggcgccaggtaaaaaaccagctctggcctgccctggaacggcaccggaacaacccatcccttgcgggctggaaatggctcaagaattgccgcgtggaaacgccggaagggggattcatcgaaggcttttccaccaaccacgccgggaaggcggaaggctggcacgggcgtgtgacggacgaattcaaggatgagcggaaggaacaggatgaggaagacccccgcagcgagaagaaagcccgtctgtttgacgttgacgagtttaccggagatgatccttcctcccccgtgtttttcgtggtggacgaggcaaagacggttcctgatgaaatctttgacgccattgaacgatgtacgcttcaattctgcatctacctttcatccccaggcaagccggaagggcaattttatcgctgtttccacgaggaaaaagacctcttctgtccgatggtggtaacggcctttgattgcccccatatctcccaggagcgcattgaccgcattctggcccgtgtggggggtaatgaggatgattcctatttccgttccgtcgtgctggcggaattcacgctggaaggagatttgtacatcattgaccctggaaaactggaatggggtcagcggcagccctacgagccgcgcagggggcgccccgtggccttcctggacattgccgcgggcggggatgaaacagtccttgccatctgcgacggaaacgaagcctggattgaatacgcggaacgacagcgggacacggtgcagagtgtccgcaagtgcattgccaccctcaaggggctgggcattgcggattgtgatttgtgggtggacgctccgggcatgggcctggctgtcatcagcgattttaatgaatcaggttggtatccgaatgagttctttgggaacaaccctccggaagaccgcgaccgctacatcaatctctcggcggaatgctggaatgacgccggactggaactcatgaccgggcgagtgcatatcaggtccaggcggccggacaagacgcttttcgtgcagttgactacccggaagaaagaatatgcggacgattccaggctcaggaacgagaagaaggagaaaatgaaggctcgcaacctgtcttctcctgatcgcgcggacgccttgctgggggctatatgggcttcctttcgtggatcttccggagtttggacaggagagggcaacaggcctattgtgggcaagagtcagcacgccgtcaaacatacggggaaattttatcccatttaggactgttcgtagcccattttgacattgttgtaccctccctcacgttggggcgataatgcgtgcatgaggcaagccgccaactacaacgtacacgccacggaatccctgccgcagtctcttgcgctgcattttatttctccttccggtgaggatatggacatcagcggcatgacgctacgcggcgcggtggtacaggatggggtgatcatgctggactgtgccgttacgggggtgagtacggcattggtgacatggccgaggctggccgccggatgcggcgcatatgatatttttctgaccgacgcatcgggcaaagaataccccttgttgaagggagccgtgcatgtaatgtcccgcgttacgcctccggacggaacgaatgaggccgcggccgtggccggtgctcttgatgtctccatccccgaaacggaagacggctccgtaaccattgtggaaaacccgtccattgtggtcgaggaacttgtacgacaggccgaagcggcccgggatgaagcaacgcggcttgtggaaacgctggaaggacaggtggaaagcggggaattggtcaatgaggctgtagcaaataaattgccgggagctctcaaggaggcgggcgtggaattggccgcggcaaccgggcaatcctccttgtccagcggggacgccgccgacacctggaccatcgtcggaggctatgcaatgacctggggagacgagattctggccgggcatctgcccgacagctgccgcctgaaaagcatttcaaccgtgtatttttttgaaaccccggccgctaatcaatattgcctgcgtgtctggaggctgacggacggagcttacagcctgattgggacctccgcctatgtgtccaacctgtccagcggccagacggccacgtgggtatttacgccgggcgttacattgcagcgcggagacaaaatcatcatccaggtgtgcgaggggacggagatgacgccctacgcgctgggcatgcacgctgtcctgaccccttccgtccccggacgcggtttgatcacggaggtgtccaacccgcccgccgtgaatggtacgatggctcccttgatgaccgtggtggtggactatgacgacggcatcaccctgggaggaatggagctggccaccgcgcgacaactggacagcctggggcgggatgtgcgccaatcttccgcgaccgccgaggctgcggcgcggacggctggccagtccgccgccaccgcgtccacggatgccgataatgccgcaacatctgccaccagtgcagccaactctgccacggcggcccagcaggctctggcggccatacctcaagtagatgatgcaggcaacatgacgttggacggcaatatcaccgcggcgggaggcacgtttgacggggccgtcaacgccaatggaggtatcaacatcccgcttgccgcgggggcgctgaccgatatgtcagcggtcaaccgcctttacgccgccgggctggctgccgtaactgatgctttttccgtcaggtgttatccgctcccggcgaattgctcgtcttccaacgggacggttttcaaaacagacaaggaacccaattccctttatttcaacgtcccggctaattccgcctttaccgtgaaatgcggcctcgtgaccaacgcgaggcccatgcacaattattccagcatccgggggtgggtggctccggtgcgccttccggctgtcagcgctaaattcacggccaggttcggccagatgaaaacggtcgtgcgcatgggaagggacagggacgcatttacgctggtgccggatcaggcggcgggcggctacaggattggggagattatcgatattacgtttgatcatgtccgggacgcggccgcaggggggtatcacattcgtgtccgggagatttattattccaatgccgagcagaaatggaagatgaagacgacgcaggccctcgcgccggagacgtcttccaataacggttatcccgtctgcgtgtacgcggtggtttacgagcaataccaggacggaggatatgataccgaagacaggggagcgttgtggctgctgcatggcgggaattccacccgcggctgcgtcaagatcgccacggtgaggggagtccattgctttgagaatatttatcccttttccggatattatcttgatatggagaatgccaacagctgggcgttggccggagcgttccttccggcgacgatgcacttgcattgcaataatgtcaatccggcgtattacgggttttcctccatggagagcaatatcattgtctccgaggcggtggaggattttgttgacccggaagccgaataagaaacgacggaagaaacgactaccgaagattgagcatgaataattcagagatacagatacagtttccccggcccggcgagtggggagaattcaccctgacggccatttatcaggacaagggcggttatagacctccggcgcgctatacgcaggacgagataccaacggaccatgccccggccatgcaggccgtcgttgcctctctggtgggcatgggtgaggactggcaggcggtgcaggtgtgggcacggctgggaaaagatgtcctgacccttgcggaggatggtgcctatacaatgattgatgcggtgtctttgaccgttgaggccgtccatgcggagaccaaaggccgcaggatttttacagtctcggactacccggcttttatcatcacggaccccgccgccgtggattttttcaagcatttcactactaaataatatgagcacgaataaagaaaaagtgagttggctgactggtctcctgaccggttggggtatcaaagagagttgggcaaaagtcatcgccggagctgtgattggggccctggttgccgcggggattctgacacaacccggctgcggtcattccgtggacgtgacgccgagccgcgccgaggtatgcaaagacggctcctgcctcgtcattgagcaggggcatatttcctattcccaggcccagcctgttacggacgttcctcccgttgttcagatcgtaccttccaagaaataagaccatgtgcaaacccctcaaggaatatctgggagtgatccgcgattatacgcgtgagatcgtcactttcggcggttttgtgatagccgtgttcatctacctggatttccgcgaggtggtgaaagaacaggctaccaatgcggcccatacggcggagatcctgcggacgatggatacccgtctccagcatttggagaattaccaccagcaacagcttaaacagcgagattaattccaactgtaaagtttttcttacaagttcactttagttaataatcaatagtttacaatatgaatcctacagaaagaaagatggccgcggctatcctccggtttgaagacagccgcgtcaccgggccggattccctgcgcgtttcccgccttcccgccgccgacaagggaggcaagtgggagatttgcggcatttgcgacggcattgaaccggccgtgtttaacagattgaaggccctgttggatgccggaaggcgtgaagatgcctgggaaggttgtctccagtacgtcctggataataccgccgccgtgcgttcctggctgggttccgacgcttttccggccacggagtttatgttgcgtgaccattttttcaattccgggagcaggaataccgggaagattttgcagcgcgcgctgaacattcacggcgccgggcttgtggtggacgggattgtcggccccaggacccggcaggagttgcaggaccagctggccgccacgggtgaagcggtgttccttatcgctctgcaggagaagcgtcaggcgttttaccgctcttgcaagcagtttcctgtgttcgggaagggctggctgaaccgctgcgacgatgcgttcagcatggcgcaggagcttgtttaatccttaaatctctattcgttcatggcattatttcccaggcttcgcggcaaggtgaaagaggcggtccagatattggtttctccgtttgctgatcataaattcaagcactggccagcctccgaacttgacccggaatccctgaaatctctgaaagagtccattgcttccgggcggctggaccggcaggaacagctctttatggctatgctggaaaaatggccgcgtctccggaagaatcttggggaaatagcaaacgccgttgcccgcatggaatggacagtcatgccctggacggaaaaaggacagcaaccgaccccggaagcgcaggaaatggcggagcttgtcgaatccgccttctggcggtcagaaccggaaccggacacggtagagcagggagcagacgatttgctcaaatccctgacctatatgcttacttgcggcaacaccgttcatcaaatcaaatgggcgtcggatgatatcatctacccccgctgttacgagcctctttccgctcaattttacgcatgggaatataactacggcaggaaggatcgtttgctccttttccgcaacggcctggaaaacgacctggaaggagaagaatttcccccggacaagttcctgattgggctgaataaggccgacgtgttccaccctatttttggcgccaagctccggtgtcttgtgggatggttcggagccgcctgttacgggttgccctggctgatgacgttttgcgagcttttcggcatccctttccggacggctaaagtcaggggtgacgaaaaagcaaaaacggaggcggcggaaatgctgcaaaaccttggttccgggggatgggccgtcacaacgcagaatatggagtttcagcttcatgacgccgtaaagggagccaacgggctgccccaggcggatttgatcaaactggcggacgaacaatgcgacaacctgatcctgggacaaacgttgaccagttccaagggggacggaggggcgtatgcccttggcaaagtgcatgccggtatccgcaaagaggtcattgaagacgcggggcaggccgtggcgaatattctcaattcccaactcattcctgccatcatccacttgaattacgggcatattccttcccgtctccctcaatttgttccctctatccgcggcattgacgcagaagccctggaaacggttgccaaagcggcggaaatcatggatgtaggagaagaattcgcccgcaccatcgtcaagatacccaagccgcgttccggcgagcctgtcttgagaaaagccccgtctatcggttccgctccgggccaatacggggatgccgttgaagccgctgcctccgagggaaaaaactagctccgctcgccctggccgtcgagttggagcaggacgcggaaaaggccgcagaagaaattttacaggcgtgggccgagccatgcgctgattttgtccgggaattgatcggcaaagcccgttccgggctttctgatcatgaatttcgggcggaactggccgctgtgcttgcccgccttccggaaatggacctcaccaatgatgatttgctgcaggaagccctgtgggacgccagcgcggaagcttaccggaaggggtgggaaatcaatcggattgaagacgagatatgaacctgacgatcgacttgaacggtgttgacccggtaattgcagaagtgaaaaaaatagcagctccggaaagtttggcgaaagccaatgaacgcatgggggagggagtgaaaagctggctttcgtcctggtacaggaacaaggcggaatccggacactttgaaaacacgtccctgccgacccacgggcctggaaggaagaaaaccgggtgggccaacgacattgcccgaaactggtttgccgagacgacggcggacggtgcccgcatctacctcaccgggcaggcaggggaggggaacgggggggaacctctagaccttgcacaatccctgttattgaaaatctacggcggcacggtgacggccaagcgggcccaggcgctgaccattcctgtcattccggaggcgcacggcgttcgcgctggcgcttacgcctctatgacgggccgcaaacttttcactcttcgtaaaagcatcctcaaccttcgcaacagcatgaccggctccggattggagccgggctgcctttttgaatcggacgggcatggcggagtcagggccgtctataagctcaagaagtcgcagatctttgcgccatggccggaggcttttccggatatggaagaacttacgggcatagcattcaaacacttcatggatgccatgcttgatgacgggggaggttccgaagactggataaattgactaggagagctaagctgaaagacggtgtaaaataaaccgccgcagaggggaaactgcggcggagtagaaaaaagatttgttatagaaatagttttatttcttttttaaaatataatgttcggataagattccttgattaattgatccttctttgtctgacaacattaatttactaccatcaagtattttataataagatttttcattagaagaggttagagataattcaatcaagtttccatttatcaaattataatgaccttttgattcgaaagttgcgcttttttctccttctcctatatattcgctcctcagtatataagttttatccttatttaatgtcagtgtcgtctttataccttcacaatcggcagcgggaagagttccttcataagtgccgtaaaaattagaattttccgacttgttttctatttttgttccatcgttttcaatttgatcatgattctcttgaggagcattgcaaccggttatgacaactaaacatgtggcccataaaaaaatcattttcatggtaagtacctttcttttttaattagtgttttttcttaattcaatagagcagggactgagaaatcaattctctcccaataccgttataatattacgtaaaactttgggaggtggcaagatattattctcggccagccgggattttattcctgatcgttacggcttgaatattttgtagcccattttgcgtctattgccccatacctccactgtgcctcatcatgggggcatgagtacgctgataacgacggtagccggcaaccacggcaaggctcccatggctatcctgtgggcccccaaaggagaacatactattaaatgctcgctcaacggccagccgggaacgtgtgtggtgcgggtaacgtccgactgcgttccccggctcaatgccgacctggaagccaagctatccagcaacgtcaaaccggtcgggctctatgatcatgagatggggcccgcctcttacaagccgggacggtttgtgtggaacgaggaaaaaggcgttgtgttggaactggaaggatggacggagaagggaagaacggacgtggaaggcggcaattacggctatcacagcccccgcttccggcgcgacaagggaaccggggaaatcctcggcctgttgccggaatccatagaagtaggttccttggtcaatgaccccgcatttgacgacatcgaacgcattgccgccagccgaatggagggcgacgtagcccattttgacgacgttgaagaccccgggaaaccgggcgacaatagagaccttgagaagcccaaggagggcctcgaccagcaagacaaccatacaaccaaccgagacatggacatcactaaactcgttgccctcggcattttgaccgaggaagaagccaaggctgaaaatgccgaggctatcgtgttggagcgcatcaaggccctgcaggacaaaggcaaggccagctccgacgaattggaagcaagcaagaaggagctggcgaaatgccaggaagaaattgccgcatccaggaagcaggtgaaggaacgcgccgtccaggacgttgccgatgccattgctgcgggcaaaatcgccccgaaggatgaagcatccaagaccttttgggaacgagccctgacggaagactatattgccgccagcaagcagttgaacgccctgccgaaaaatcccgcattcgatgacgtgaatgccggcaagccggaaggctccccaaaagaacccgtcacgggaaccgcggctcttcgcagctcctttgaaaccgaactcaataacctgaacaagtaatatgcccgcgaaagaatttatgaccctgctggacgtgcttcagcaggaaggaacaggatctatcaaggcccttgacgcagtccgttctgttggacttgcatccccggaagtaaccgcgtttcccgttaccgttattgacggaacgcagtacgaaatcaatatgcccaccggcattccccgtttcgggtttcgtccggccaatgccggagccaagaacctgacgaccgaatacaccaataaaaccgttaagtgttactacattgacggacctattgcggtggacaaggccgttgtcaccagctccgccaggggggcgcagctgctcaccaaggaaacccgaagcgttacgttgggtgccatggcctccattgccctgcagatgtggtacaggcttccggaacaggaaaatgtgttcccggctatttctgaacagatgggggattatatgaccatttccgcggatccttccaagcaggaagactcggaagccaaccgcgccgacaactccggagcttccgcttacctggtcattttgggtgacgacttcctgcactccatatgggggaacaagaagacgctttccatgtctccggtgcaggaagagaccgtagccaggaatacggaagacggggaatcaggaacaatgagggcctatacttcccgtttggaaggctggacgggcattgccgtggaatctccgttttccgtggcccgcatcaagaacatcagcgcccagcatcccttgacggacaaacttgtcgccaaggcgaagagcctgtttcctgcggccttgcgcggcatgatttcctatgtggttatgaacggcaatgtgaaattgctgttgcaggaatccagaacccttacgcctgccaccggaaacggcggaacgggcatgatcgcccctgaacccgattccgtgatgggaatcaagattctggaagtggattccctgcttgatgacgaatcactgtccagtgtccgcgccgcatttgcggaagactttttccgcgcccgtcgcaactcccttgccctcaaaaattaaccttttatccgcagaaaggagaaacacaccacatgatgaagaatatgtaccgcaatgacgaagcgcttacgatccgtctgaagatgccgggaaccggaaagacggtaacgtctgccccgattcatatcggacagaaaggaggcatcgacagcgctgtcatttcattgaagcacgaagagcttcccgcgctggccgccggcaagacgatgaccctcaccgtcgaatcgtccgaggacggtgatgcctggacggaactggattccccgaagctggttgcgacggggggtgagagcaatggttccggctccggagaagtgttcatgcgcgttccgttggaggccggcccctggctgcgcctgaaaatcgcagctgaaacgtccgcaggcgacagcacggcacaggaagccgtccttgccgtcaaggtataaccttattgaaacaatggccctcgtaaggattactccggaagcggttgcccgctattgccaggacaaggaaattacttccattgcccgggacaaaatcagcgacatcatccgcgaggtctgcaacgaggtggcggctgcagtcaactcctgccccagaaatgccaggattgcgatggattccagttccgttcccgcggagttggtattcaccacctgcattctggtgcgggatgccgtcaccagctccgtgccaggttcaagcgaatccctgcaggggacggcgcgggcggctcaatatcaggatgcccgcgcgaaactccgcgccgtggctgcctgtgaagtcgagtttgccccctacgatgggcaccagcccagcgacgtcatttacggagggccgaaacaccaggattggagcaatccgatatgaagaaaaccctgaagaagtcgcctgtcattgcatttgcggaagtcctctgtcagcgggccgtggaaatttgctccgcggccaacaacggggaagacccggaaatcattattaaggcatgggacggttcctttgaggaagaaatcaagagggtgaccggttccctggaaaccgtcatcgtcatggagcgtccggaaattgttccggacaagttgagcaggagcggcaaaagcacggccagatggcacgtcaccgtggagagcaacccgcttctggacggtgacggctgggacgccgacgaccttgccgacatcatccaggagggctttcacaagtggcgccgcaaccatgcccggctgatgatgacggaggtaatcgttaccagctccaagccggctctcgccaaaatcctgaaaaagtccatcgtcctgacgatggaaacaaccctgattatcaaacatggcaactaaacccaccaccgccgcggcccaggaggccgctactgctccggcgccccgcatcgtcaaatgccgggtggccgtcaacaagctggaactccctcacggcatcgccgcgcggggaaaaatcgtccacatcccggaagacgtgtacaaagtccacgccgacgccgggaaagtgacctttattgactacgtaagaagctaacaaccatgtcagaactctacaacaaggaaatgctggtcggcacctttctcgacctgtgcccgttcggaacgacagtcacggccggaagcggcacggacacggtggacgagcaattcaagccggcgaaggactccgacgcctggatgatggccaacgaagtcatcgactacaaaatcacgccgaccacggaagacgacgcccgcacggtattttcccgcgacacgacctcctatgtgacgcggaagaacaccaaagtgacgggcaacaccatcgagattaactccacggaggttaatccggtctgctggcaggtgatttaccagtgcgacaggctggaagccgggaaggaagtgcagcccttttcccggaacatctacgggcaaaaggtatgggcgcgcctcaccaaataccaggaagacaaaaaagaaatgatggtcctggaagtcgcggcgctgctcaaggtggaaatccccacggaaaacaacaagctgatcacgccgaaattgacgcttgaagtgataccgtcctccctgaattccctgacgcccacggaagaaatcgccttcccggcctccgccggggcatgacagccggagccgcccctctgtttgcatggggaggggcggcccctgtttccccccaccactattgaggcatggacacgaccatttctcccttttccatcacctttgacgggcgccccgtcgtgcgcgtcggagaattcctgctcgactccctgccggaacacgctttcccggtgcagttcggcacgtccgccacgccgatcatcaacagcccgttccccaggctggacgcattcggcaacctgtccctgtccttcaccatctccaccgtgcgggaatgcgcctcccacatggaagcgtggggcgccttttacgaatggctcaacgaatggaaaacggcgggaaagggggaatggacctggaccgacgcctgcggccgtgaacagcgctttgaagccgtcatcgccgacgccgaaccgaaggttcagggcctgcgccttatcgtctcctacaacttcaccctcggccgccccctgtgaaaacccttgacgtatcttccgccgacttcctggacatggccgaaagcccgtcctacaaccggctctccttcgggggagcctccgtttccttccgcgcgccggtctcccggtttgcctcctgcccgtttgaagaaggggaaatagtgaaagtcgtctggcgcgggaaaaccctgctcatcggcccggccattgacctggaacactcccttgaaggaacctccgagagctgggacatcaggatttgcgattactggtggaacctgagcaacatccagtacttcgcgaatggccgcgccaacggcatctttgccgaataccgccagggcacaggcggaagcggtcaggaaaaacaggcgaccgcgaacatccgggacgccctctccggagtcctggaccacgccgtcagcacggccctggtccccatcaaatacgacctccggatcgacaaggatgccgaaatcattccgtttgcctacgcgtcggaaacgtatgcctccctgctttcccagatccagcaatggcgccccaatatggccgcgtggtttgaatacggcgcggacgactccgccacgctggtcattgccgaccatgcccatttgccggatgtcgtgctcgacctgtccgccgtggacgtaagcgccctgtccctcaaggcgcgtcccgatctggtgcctccggccgtggggttgacctgcaacgcttccgtggtctcccgggttcagcgcgcgctggccgtctatccctcaggcgcctccctgtcccagccctatgtggtgacggcggaagtggacgttccgggcggcgtcaaggtctccgacactgccgggcaatacagccctgcggaaacgggctcgctgggttacgacgccccgcggatgattgtccggggagacaaattcccgaccggcacggcccagtgggcggcccgcgtcaaacgctgggctccggctctggaggattgcgccggcctggaagtggcggccagtccgaaaatcacgtccatcacgccggctgacgcggaacaccggggatacagcagcgcggccgtcacccacgaactgacctccggccagatcaacggaaagagcgcgagaatcaaatggggcaaggtccgggtggatttgcgggtgctggcgacggatccccccgacacggtgaaacaatattttccggaatacggcggaaaatccggaaccggggaccgctggatcggaacattgacgtttgaagtgaccacgacgaatgtcggctacgcatcctaccgggtggacagggcagggacggtggaaagcgtgtccgacgacggcggaagctccggagacgacgaaacatcgggcagctacgacacctccgcactgtataaaaatttcctgaaatcctactacgaagccacccgcgcgttgccctatgacggatccgcgaccgtccacgacgactttgaccaggtctgcggggggcgcctctccatcacgggagggttgaaagaatgggaagccatgcggtccgtcatccaggaaatatccctcgaccttaaaacgggagtttccgacgtgacggtgggggccccggaacagatctccctgcaggactccatcgaccggagccggcagcttgccgaggcgctgcgccggacggcctgggcggactcgtccacgtccgccgggggcggttcttcgggcggaggatccggcagcggaggcggaggctcttccggagcggacgatgaagtcccggagcttcccagcgtcgggccgtccgtaaaactgctgcaggcccaggagcctcccgcgtggggaaccagcgccgtcgaggtgggattccaatgccgcctgtcttacgggagcgacggcaaggtgtccgacgcctacatccgccaggggaaggctatctatgccggcaactatatcggggggctgcttccggagggggccggttccgggggatgggtgaaaagccccgtcacctccggggaaatctggctcaagatccggttggacaaggacgcgaaatatctcggatcctctctgtccgccgcgggcggcgtctccgaccccgtcaggctcgcggaggaagaccgggaaaccccttatgaatattatttccatctggccaccatcgacggcaacaaggtggtgcagcaccaggcgggcacggtttatctcctaatccacccgggaaccttcggcccctccggaatgtcatgatcaggatatacaccttcacctatgccggagacgcgcaggaagccgtggcctgcgtccggtgcgccaggacggctcttccggaggcggtagttacggtggtggacgacagcgccgccccggtacccccggaggccaggagggctcttgtagcgtatggggcgcggtatcgccggagctctttcccccgctgcggcaatctgcgcggcccggagtgcgtccggggaatcattaccacgctggccaagggggcggcggatggcgataccgtcgtcaagattgactccgacacggcgcttctgtcgggcggatgggtcagggaaatgaaacacaacgggcttgcgctgcacgccgccggataccgggtcccccggaacccgtccgaacggtccgcctacggaaattgctacgccctgagcggccgggcggccaggatggccgccgaagcgctggaatgcgccgctatccccccgctcgccccggaagacctcaccatctgccgggccgtcatggatgtctgcggccgggagcgtgtccggcttgacgagccgtggacgccccggaaccgggccgggcggtggtcctggtggaactgggacagccggacggcgaatccggaggattatgcccgcagctatgacgtggtgagcgtcggcaatcccaggcctccccacgttcccaaaagcgcccgccgggaagtcatgctcgccctgtgcgacgcccgtttgaatccatgaatgctccggcaaccacggatatgccccccttcaactacccgttgaaacaacaacagccaaccaaataaaaccaatcagtaaaaccatgtcagacagagacttgaacatcaacatcaggacaaccgccgacaccaccggagccgatcagactgccgaggccatcaacaagaccagggaagccgcccggggagccggcggaagcgcgaacgccatcaaccaggtaaccgacgccctgaacaacgttaaaacggccgctgaagaaaccagtgtcgccatgaaggacggcatgggggcggaatatgaacaagccctggaaaacgccaattccaaacttgaccaatacgccgacgccctgaccgccgccggctcccggatgaaagccgccttcaacgacaacccgggattgaccgggtttattgacgaagtcaccaacgccgtgccgacctccgaggaattcaggaagaagctggaacaggtggatgacgtctttgaagtcctcaataacaaaatgtctgatttggaccttggggcgaaatggggagatgaccttgacgaaaaccttcaacaaatcatcgacggctacaacaaggaaatggacgccgccgacaaggccgcggaaaaggcggaagccgcagaggcccggaagcagcaggccgccgccgccacggtggaacggctggaagccaacaaccgccgcgcctccgccacctatgaagaattgcaggccgagttggaatcctacattgccaagctggaagaggcccggaaggccggggataacgtggcccaggcggacgccctgaaaaatatccaggatttgggacggcgcatcaagacggccggggatgccggacaactcacttccacgcaggtcaaggggctggccgggcaaatcaccattgcggcaacgcgcatcctgggcatgtccagttccctgcgtggggctattccgtttattcgtctttttggaaccaccattaaaacggctatggggccgctgggctgggctatgctgctgatccaggggctgaccgccggcattaccgctttgattgaccatttcaaggctaagagtgatgaacttgacaaggccgccgagaaggcaaccgaaaggatgaaaaaacgtgccagggatgccgccgaagccatcaaaaagagttatgaggccatccaagactataacaaagccgaccggacgcaggaaatcaacaaagggttcgaggacttcatcaagggcattacgacgcaataccgcttgcaaacgcaggagattgaacggcaaatccagctacggagagaggaagccgcccgccagaagggtattgacacgcaggaagccgagcttgcccgcgtgaagttggacaatgactttgaagacggcaaaatcaccaaacgtcagcgggactacggcatgatgatgattgaccagaatcttgacgacaaaatacgccgccgggatctggaagtagcgcagaaggaattcatggactacggaaagcagttggatacggccgttcaaaaccgtgaccgtttgcaagataaggactttgacatgaagttcattcaaggtcaaatgccctcccttcaggaggttgaaagactgttccagcaacagttcaaagcccaggaacggattgatgcgagtaacggtagaattagcaaggtgaatgaaaaaataaatgatattgaggcgttagcaagagtccctaactccgaaggacgaaaagctagggaagaattggcaaaacttcaagccgagaagcaacgccttctgtctgcccgtgatgcagcccaaaacgagggaaatgccgccactgtcagaatagatgaactccgggacttgttccgccaatccggcgtgaactttgaaccatcctaccagcagggaacggacgtaaccagccgaaccggggaatatcaaaaagccctggaagaccagaacaccaaggcaaaagaacttgcggacaaacttgccgatgccagagaagaagccgggaagctgggggatattatgggggcctatgaacgcaacattgttgatcaggagcggagcatcaggacgcaagaccggctcaattccgccaatattgacctgttcaacaaacgggccgacaaaaaggaagcccaggaagccaagaaggcccaggaaaagcttgagaaagagcgggaccgggagttgaagaagcttcagcgggaacagcagaaagatactaaagaggcgtttaaaacttttgtacagggattgctcatgaaaacgggcgaaagttctagcccccagcagtcagacctggccaacaaggctcttgatgtcatacgtaaaaatattgaagctgcagccgcggatggacacattgatgaagctgaaatgagggaattaggcaagctctacgttgccaagcttcaggaattaggactggcaacaaaacgtgccatcaatggattgaaagaggaattaacccaggggttgagaggaatcaatgctcaaattgacgcaataggtaaatgggccaatactacccaaaggcagaaacgccccgggggaattgttaatcttccttaccggagatagatttcttcaaaggattaaaaaatatattttatatcttgttgaaaagtagaaggaacaatatgaaaactattttttgtatataatattcgaatcttttgtttgaaaatagtcattgatagtcaacctttctaacagagtagggatttctactatcattgataagcttgatgagttcactagatttaatgacgagtccaaggttaatcatctgtttagatattatgatagggataggtggaggagaaaagctgttttttatagaatttccataactatatccttcagttataatgcccaataaaaaaacttgtataatttttttgctggtagattttaaatatttaataagaaaaacaggacttccgctacttcctggaaagatggaagcatcaatgagaaattgatactttccctcataatttaacgaaataggtgtagcagttataccttttcgtgcaataggggagttattgtatgtatcgtatattcctgtaggataaccaatgaacagaatatcttcaatggcatcaaaattctccacttgcttccgatttggaatttgatttggagttaatgtttttgcagaggaaggaatatcgttcaatatacaaatagctatatcatactgcaaacttgttataaaattattttttataacaagaaaatcatcttgaccataaaatttcaattctatttcttttgaatcttcaacaacatgtctattcgttaccaaaaatatatttttatgagagtaaaataaaaaacctgttccagatgttaaggaatctttatttttaatattaattaagacagttgttcttagtaattgttctcctatagtaagtatctctttcataaaataatgtatgatatttcatacatagaatgttctctagaaatgtgaggcacagaaatgttgttggtgttgagaatagcaagaatatagcagcagaactttagaaaactggaaatacaaaggttttagtcgttttcgagagaataagcgttctctggctataacgcaccagaattaagatgcttctaaccatagagcccctaattaggggcaggaacgttttaatccttgtcaatattatacattctcttggaaattgtagtgagtagctcgacggtattagaaagtaatttaatgactttggcacaccagaagcatccaaggcaggagaaggctccggaaagtaggtaaatgaagcctaagactggttgccgatcttttgcagttgaaaaaagcagcacaaccccagcgagtagagcaagaatacctgcaatacggaataagccttcaacggttatttccaacggtttaatatccttctgtaactctttcttgggctgctcctttggaatgggatcatattcattcatcagtctttccaaggcttgttttttaggttcttcacagggttgaacttctttcttccgctcttgctctaaaattgtccaaaactgcacccactcttggccgccagcaatacaaacaagggtatcatcatttatcttgccttcggtgtaaaaagtttctagtgatgcaaaggaatacggcccttccgtctgtccttcctccgttgcaatgtaatactgttccattgctttttatcatttccagatagtatttttctgcaagtccaaaatagacaaggctgattttttctggcactcttccttctggaaagaattaccgagaacacgagcgagaaatgaatcgcagaaactgaaatagttacccagtagttacccatgaatcgttttttaataaaaatattggagtatcaatgttttgaatttgtcttaaaatctgttgtccgcaaggacataccggttcgagtccggtcgggggtacttctttaaataacaatgaattatgtaaattaaaggctcgctgtttgcgggcctttttgttttgctgcaatatcatttgctggctgattctccatcaataatttttgttttcccggatgagtaaaacaaggatggtggtgtttcgtggctattcttgtcatgaaatgcagaaagcagagagaagaatgttgagtggaaacagttctgaaaaaagagtttataacagggcgcctctggctgaaaaatagaaatacggagtatgaaattgttgggtatcttccggtttggaaaatcagatggttcatggcgccctggaaaaaagggaatgctgctggcgttgaaaatagcaggaggcatgtttgcgggagcggttgtggtatgcgttgccgcagaatggtacatttattccgtttcagagggcaggattgttgagcattccagggatgttcccgttcgtgctcctgttctggtgttaggatgctccccaacattcatggggagccctaacggatatttccataacaggatggatacggcctcggaactttggaaagatggaaaagcaacggttttcatcgtttccggagataatagttctcatgcttacaatgaaccggaatggatgaaacaggctctggtggaacgtggcgttccagaggaacggattgtatgtgactttgctggattgcggactttggattctgtcgtgaggatgaaggaaattttcggcgtttcgacgatgattgttgtttctcaggaatttcataatgaacgcgccctggcaatcgcagcgcatgaggggatggcggcctgggccgtcagcgcgccggatgttcccaaccgccgttcccgtatgaaaagctggttcagggagcgtgcggcccgcgtatggatgatgctggacttgtgggtttggagccgtgaaccccgttttttgggagaacctgtggttttgccggaaataaaagaggaaaaatgaacaatacctcatgcggcagggctcgtcataagatgtctttgatgcggtacggcaacccagaaggagggtgtgcccgcgcctcgaatcattaaatgctgaatggtccaatcatgtcggctacgtgggatgatttgccatgaagatgaacaaggccagaaagcctgagtgaacaattcgtcatgaagacggtcggaggtggtggccgtacgtttcattgtccttcatggaagaaacaggtgcaatccttccccttatcttatgcgtatgggtgggcaacggttgaaaaaaggatggttgggaaacatcagaaagctgatgctctggtcggaataagcttgcctccatgtctttggaaaaaacactctggaacaggttctgttgcgttttgatgcggctgatgctccctgttggaattccatatttgattaaaaaggggaaaggatacggtaaaaatcattgactctttccgggaaagtgctatgcagatttcagcggcttgtgaaaagcgggctgttttattccggctgtcatgttcccttcttctagcggtcaggaaggccgtctctccaacggcaaaggctcggttcaactccggcagggaatgccatccggcagccatgttttgtttcctgccgtgaagaggcggtaaattgcatcaggaaaagcaagctacggggagttatgatggaaacacgctttcaatgactttccccgtccattccggtagtggctttcctccgaataaatgaagaagcatgggagcggtattggtggtattgtttggttcggaaatcaggaaatttctcttaatgcccggacctgaaattccccatggaactatcatttccgctgcgctcgtccccccgtggccctttccgattcccccatgatccgtcagaaatagaaaatgcgtatcgttgaataagtcttcctgcctcaatttctgaaaaaagattccaatttgctgatccgcctcttcaatagattgaaggtattctctggacatccagccgtatttgtgccccgcatgatctgtatgaacggaatagagaaaaaccacagtcgggttgtagcggtgtttcttgacgaattggaaagcctgatggtaattggaagcataggcgtcgtttgccaggtacttgatttcatccaggtattttttgttgaacggataggcaagaggtttccaattatagtaaaaagctgttttgcaggaaggctggcatttttttcagggcctggaatacggagggataatatccgtcttcgtctctccgtacggcggggtaggaggaatttgccggcgtccagttattattgaagactccgtgctgttccgggccgctgccggttaagtgactggtccagttaggtaacgtgacggagggtatcacaacccgcgtatccagagaaaaagctccctgtgacatcattccttttaaagagggcgcatgcgccttttgaaaaccttccacacaaataccgtccagggaaatcatgatcactcttttggcggaattatcggaagttctatctggtacggaatttctgggaatgccggaatcatattgtgtagtggcaagggctgtattgcccgttgtcattcctgctgccgccaggcctaattgattcaggaaattccggcgtgttgtttgatgataagagttttccatataaagtacatactgttggcttgaagtatttttatcaacgcttctggatattcgggaagctcatttcatcgtatagttttttacggacaggggccgaatccgggtttcaaagcaatttttccaataattcgttcctttcctgtgataggatggttttatagagaaaggatatcatcatttattgtattcaaatagttaagtgggtgtggcaatataggaatgctccgaaggctgtctcatctgcgatttaggcaaagcatcttccatacgcttcaaacgagggggcatatcatatttgttacgggccgtatcctcatcaatgttggccaaaatgccgggcgggagcggggactttcaatctggacgttttacacaggatgacattttccgcgagctggagcagatttttcaaggaagtgggtgttaggtgcagtcagctccctgaagaaagatcagccggaggcagacagatgtccctgatgttattcctccaacaagacgggacaagcccggcaggtgtgggtgtttgccagccatcacgatgctcgcgccgccattattaaatcagccaattagcataatgataccatgagagagatacaaatacagttttccaagcccggtaactggagggaattcacactaacagccatctaccaggattcggatggatatacccgcatagaccgctataaacagaatgatataccgtccgggcaggccccggctttgagcgcggctgtagccgtcattgcagacatggaagaggactggcaagccgtccaggtatgggcaaggctgggaaatacctctgttctcaataattccgcaggagacgatgaggccgttgagtttcgtgaagcagttctactgacgattgaggctgtcaatagcctcgggggccgccgtatttttgcccccggtaattatgcgcagttcatactgatggattttgcctccatatcgtttttcaagtattttaccatcagaaaataataaggatatcagcaaataagattgttggactgactgcatgattgcggcagactgggggatatgtgatgcagtgttttttcccggacaaggcgtttccggatttgtcgatgcattgcaacagttttaaatggaaaagatgttcctcccaggcaggagcggatcaaaaacagggaatcaatgacagtaaccccatgagtgacgtaaagcagttcctggtcaacgttgggaacaggaagggcctggtctgtcgtgatgcctcaaaaattgcagattcccttatgctctgatgtttatcggaaaacctggatggagtatcgtcatgcggctttaaaaatacagtacattgtttctaaaagccgttatcatgtactgcggttctataaaaacaataaccgcaagccttgtttttcaaagacttgcggttgttttgaaatggtggaggcgacgggagtcgaacccgtgtcctgaaggccattgatgacggcatctccatgttcagacgcatattgctgctttcgcggctgcttcgctatgcgtcaactaggcaagctcgctagttgcctgtggaagtctcgtgcgttgcgcggcaaccccgcattgcaccagcctgctgtgtcttcgtcgtcccctctagcaggcgttgaggttctgacgcggctgaactaattaggcagccagagcaaggtcgttagactctgcatttatttttttaatcggctttttagaaggccagccgattaaccttcacatgcagccagcaccgcagacttccagtcgaaaccatggcgcccccatatgtatttaccagtagagacaaaaaatcccgccgtgatgttcaggcaggaatcattttatttgctggcagtgatgcaagtggcacgcccgtagggattcgaaccccaaaccttctgatccgtagtcagacgctctatccaattgagctacgggcgctttgacttgcgtcgtgtaccgcgtaagcggtgaagaaaatatagatttttcttcgggaaagtcaagatgtttgtaagatgatttgagaaaaaaattcatttttctctttttgggagaataaattttcagagaaagaaccgttaactgaggggtggagaaaaaggggaaaggcgttgcgccatggaatggcctgtggcacactaaacggagaaaatgagcgagttcaaggtgatcagatcgccgatggaggcattgaagaagtacttcggcttttccggcttgagggagggccaggatcaagtggtggcttccattatggaaggccgcaatgtattggtcgtgatgcccacgggaggaggaaaatccctgtgttaccagcttccctccttgtgccgggctggggtttgcctggttgtcagtcctctaatcgctttaatgaaagatcaggtggatgctcttgtcgccagagggattcccgccaccatgattaacagctccctgagtttacctgagcaaaaggaacgtttggacggaatgaagaagggggcgttcaaactggtatatgtggctcctgaacgttttggtcatgaagggttcatgcatgctctggcggaggtggatgtaaatatggtggctgtggatgaagcgcattgcctgagccagtgggggcacgatttccgtccggattatctgaagctgggaaaagctgttgaaatgatggggcggcctcaggtggctgctctgaccgccacggctactccgcgggtgcgggaagatattctgaaacatttggggctggatgatccggtgacgatcgtacgagggtttgcgcgggaaaacctgcatttccgcattactgcgtgcgatacgcacaaagacaaatacaagaggctgtacgaattggtgaagcgttacaagacgggtattatttattgctccacccgcaaaaaagtggagcaggtatatgaggctctttccgattttggattgagcgtgacagcctatcacgcaggcatgacggatgaacagagagaggaagcccagaacgctttcatgaaccgccatgcggatattgttattgccacgaatgcttttggaatgggcattgaccgtgcggacgtcaggtttgttgcccattttgagattcccggcagtgtggaggcctattatcaggaggccggccgagccggacgagacggggaggaggcttattgcgaacttttgttcaaccatgcggatttgcggacccaggaattttttattgaaggagtgaatccgggaattccattgattgtggagctgtacgagttgctcagaaagcattgcagcgcagaaacccacgatgtcatgtggtctctggaggaaatggcggagcgtctcaaatgccgcaatgccatgcaggtgggagctgctttatccgttcttatacgcaatggagtgatcagccgtcatgacgttccgggacaacgcgtgaagcttaccagagtgacggatccttccgtaagcggcttgaagattcctctggatgaagatgccctgcgggaaaaggaagtgagggaccgggaaaaactgaaggcaatgacggagttcgcttattcctccggctgccgtcagcaatggattttgaattatttcggggaggaagatggagtgccgtgcggccgctgcgaccagtgcctggccctgggcgttgaggaaggccaatccctgggagaggaagagactttggtggtgcggcaggcgttgagcgggattgcgcgcgcatccgtgcgtttggctgatggttcctggcagggaaggtggggcaggacgaaaatcattcagatgctcaaaggggcgaaaacccaggagttgttaagaacatccctggtccggctgagtacttatggcatcctttcccgatggagtgaggacgatatccgccagttgttccgtgccatgcagatggcgggattgaccagaatgagcggggaggcggaccgtcccctgattaccctgagtccgaaaggaaatgaagtgatgatggggcgcaagaaggcatctttggtttggccttttgcccgccggggaaaaatatccgtatctatggagcaggccagagttcggtctacgggaaatttggctgccctgggagagtttgacgaggatttgtttttgaagttgaaggaactgaggaatgaactggcacgggaagccgggattccggcttatgccgtgtttcataattctacactggaaggtttggccaggttgaaacctaccacccgccgtggtgctatgaacgttcacggcattggagagcagaaagctgctcgttacttggatgatttcctggaagtcattgccgagcattgcggggtgtgaatttgtctttccgatttgctccaatcaggcgtacgccgtctctggaacgtggtgttcatgctgaactgaggaactatttttcatgaattacggaaaaaatgttccatgctttgcgaatatatttgccgggaaaatgcgtatttgtttgaataaattgttcatcaacatcaagttgtggatattttgactctttccagaaggttgttttcctgccctcatgggacaatcaaatgaatggctgtctatcccgatccagtaggatcgagaagattgcctgatcaatatttttgactgtattatttatgtattgacttcattttgggaagcgtgtagtctcctttccacacattacccaagacggagcggtggctgagaggctgaaagcactcctttgctaaaggaacgtactggcaaaaccggtaccgagggttcgaatccctcccgctccgccaaaacctttcttttttaagagcctgcactttaacggtgtaggctcgttttctttgccaaccaggggattagatgctgtggaattatatgctggtctgattgtcttattttattttttcatttgaaattgaataacttaggccaaaaacgccggttaggatgcctagccagcgttttttctaatatccttattataggcatcaggataattataggtgcatttggaaaaaggtctggactggaggctgttcctgagggtgtttttttgtgaatgatgatataaatttttgaatgtaagttagttgttgcaggagatggacaggataaaactgccgtggctggtaaaagtggagagtacccggaattgaatggacacgaatgtggttcatgcgccggtctcggagtggttcacggccgcatcggatatgttaacagcttcaggatgtgtgggaaagtatggaacagccactccagaatgggctctgtcttttttttatctgcggaggatttaacggattttggaataatctggtgttatcaatggtcaagaccatgaataacaatattaaagaacatcctatccaatttgaagcagatatgattcgggcattgctgcaggaatacagcactcccggcgagcacaaaaatcaaacccgccgcacgttcggcctgaaccagtttaatgatctccctgaagctttgaaagaaagagggtgggagattcaggaatttatagaagagtccggctcgtggctggctgtttccgaggaaggaagcggaaagttttcagatatttttatcccgtggattgaatgtccctacgggaaagttggcgaccgtttgtgggtgcaggaggagatttgccataatagccgttctggatggctttattctgctgatggcgtttgtttgccaatgtcatatccagacggatggatatcaaaaaatacccgcaggcagtttattccttcgatccacatgccgcgttgggcttcccggattttactggaaattacggaaatcagagttgagcggcttttggacattacgacgaacgatgcacggatggagggcattgaatgcgtttggcacgatgaagaaacggatgcctgtttatggagggattactcgggaaaatctgcggggttggcttttgcccggttatctttcttctctttgtgggaaaaaataaagggaaccggttccgctgaactgaatccgtgggtatgggttattaagttcaatgtgttaactatcaacggaaatatcaaataaagaatgttaatgccctttgtgaagaacaaaataagaatatgtcttttacagagggttcgcccactaagcggagggaatagcctccgttgcaattcagataaaatccgcgtgatgtaatcaactccgttttatcatgaaaaaagcgccttccggcaagggaaggcgctggatatgaaaaggtgaaaaagagggaggttacatccccttgtttttcatggcttccgccagggcggctcccatctgagccggtgtcttggcaaccacaataccggcgttcttcaaggcttcctgcttagcggcggcagtacctttgcctccggcaacgatggctcctgcatggcccatgcggcggcccttgggcgccgtggctcctgcgatgaacgcggcaacaggttttttgcagttgttcttgatccattcagcagcttcttcttcttcagaaccgccgatttcgccaatcatgatgaaggcgtccgtgttcggatcttccgtgaagaattgcacggcctgttgctgggtcatgccatggacagggtcgccaccgatgccgatgcacatgctctggccaaggcccatgttggtaacctgccagacggcttcataggtaagcgttccggaacgggagacaataccgattctgccgggtttgaagatgtaggccggcatgatgccgatcttgcagttggcggaaggattgacgattccggggcagttcgggccgatgagggttacgtccttgtccttcaggaaggttttcaccttctgcatgtcctgcacaggaatgccttccgtgatgcagacgatgagtttaacgcccgcgtcagcagcttccatgatggcgtccgctgcgaagggaggaggaacaaaaatcatggaggcattgcagtccgtagcttttttggcttccgccacagtatcgaagacggggactttgccttcaaagagctggccgcccttgccgggggtcacaccggcaaccacattggtgccgaagtccatgcagtttttggcgtggaacgcgccggcgcttccggtgatgccttgcacgaccagacgggtgtttttgtcaatgagaggtgtcattgtcgtaataaatagtgagggttatttaactgccgcaaccgctttctgggcagcttcgtccaggttgtcggcagggataatggagatgccgctgtctgcaaggattttcttgccgatttctacgttggtgccttccagacgtacgacgagcgggattttcatatcgatgtttttcgccgcagccacaatgccctgggcaatgacatcgcaacgcatgatgccaccgaagatgttgaccagaagggccttcacgtttttgtcgctggtgaggatgcggaacgcgttggttaccatttcttccgtggcggagcctcctacgtctaggaagtttgcgggttcgccgccgtagtatttgatgatgtccatcgtagccatggccagtccggcgccgttcaccatgcagccgatgttgccgtccaggccgatgtagttcaggtcgtacttgccggcttccacttcgcgggggtcttcttccgtttcatccctcatttccatgatttccgggtggcggtacagggcgttgtcgtcaaaattgaatttggcgtctagagcgcacacgcggtcatccgtggtaactacaagggggttgatttccaccagagagcagtccagagcggtgaaaagcttgtaaacgttggtgatgagcttggtggtctggcggagcaggggaccggtcagtcccagcgccacggcgattttgagagcctggaaaggcaggatgcccagcgccgggtcaatgtgttcgcggataatggcttccgggcgggtggcagccacttcttcaatgtccatgccgccttccgtactggccacgataacggggcattcccgggcgcggtcctgaagaatggcgaagtagcattcctttttgagatccacggcttccgccaccatgattttgctgaccagcttgccggtttccccggtttgcttggtgaccagaacctggttaagcatcttgccggcgacttcttccacttcctccacggacttgacgacgtggacgcctcccttaaaaccgtttttgaaggtgcctttaccacggccgccagcgtgtacctgtgccttaactacgtattgggagaggcccatgttccgggctgtttgtgctgcttcctgagctgtggcggcggcaatgcccttgggggtagccacgccaaaacgctcaaagagttgttttgcttgatattcgtgaatgttcatgacagtgggccgtttggccaaatgtttgcggaagaaaggctaggactatttttgatgtcggtcaagggagaatggtttggtcttttgattttttgtccggaggcgccgtgaagccctgttggaaatcaaagaggacagaaggcttgactgcgtgcttaaagattgggaaacttccttcccgtttttctgtagagactttttatgaaaatttaccgtccttccgatacctgctttgacgaaatgaagcgccggatgaaccgccgcgccctcccggaggattccgtaagggataccgtgaacgctattatccaggatgtttccgcgcgcggggatgaagccctttttgactatgcctccagatttgacaaggcgcatctggattcttcctccctgttcgtgacggaggcagagctggcggaagcggaggccatggtggaggggagtgtgaaggaggccattgccgtctctctggcaaacatccattatttttcagaccgcagccgcaggcaggactggtccggcgtaaatgcgcagggcgtggaggtggcggagcggttccttccgtacgaccgtgtgggcatttatattcccggagggaaagcgcccctggtatccacttccatcatgacgggcggttttgctcaggccgccggcgtgcgggagattgtggccgctacgccctgcgggccggacggccgggtgaatcccgcacttttgtatgcgctgaaagcctccggcgcgacggaaattgtcaagatagggggcgctcaggcgatagccgcccttgcactggggacggagagcgtgaaaccggtggaaaagatttttggtcccggcaaccgttttgtggtggaggccaaacgccagttggtgggggctgttgccattgatttgctgcccggacccagtgaagtaatggtgctggcggatgatactgcggatgcagagtttctggctgccgacctgctggcgcagggcgagcatggcccggacagcgtagttgtttttgtcactacatcagaggcgttattggagcaggtggatgcggaagtggaacgccaggccgccctgctgagccgcggatccatcatccgggaggtgctggacaagcatgcctacggttttctggtttcttccattcaggaaggggtggaactggttaatgcctttgcgccggagcatttggtgcttgtcactcgggatgaagaggccgtacttaatggcatcaggacggcgggcgccatttacgcaggctccctttctactgtagcctgcggggattttctggcgggtcccagccatacgctgcctaccggcggcgccggcaagtctttttccggcttgcgggcggaccagttccagcgccgcaccagcgtggtgcgcatggaccggaatgccgtgctgaactccgccccgtatgtggcagagttcgcccgggtggaggggctggacgcccacaaccactccattcaggttcgcgccgcccgtgtggaccggtaattccggatttttccaattctctccatgatgcaacagaggggaaccagggaacggttgccaattgcagcaggtctccttattgccggacatggcgatatgggcgtttcccggcatcatgggggtggagtgacgtcgtctgttgagagcatggtaaccggcttgccgattcgtttgcgagatttgtcgggatggaacgctcatcggatgggaggtttcatccatttgatcgaaaatcccgcgtaatcgtttcaccgcatttctcatgttcaagtccctcatccgcacgtttgccattgtggcggccttcatcgcggggtacatgatgcccggtctgcatgtgtacagttggatgttcaagtggatgctgattgtgatgctgttcgtaacctttctgggcatccgcttcaaacgcatgaagccggaacgggctcactggctcctgacgggggctaatctgatggtcgccttggcggcatggggtgtgtgccgccttgtttttggggatgggtatctggcacaggccgcttttttcgtaggtatcatgcctacagccacggcggctcccgtggtgatggggctgctgggcggcagcgtggagtttatgctgaccgcccttttgctgattaacggtattatctgcgccctgctgcctttcatcctgccggcggttgttgggcggggcggttttgagatttatctgaacgtggcccagaatatttccttggtcatgttgcttcccctggcgctggcgctggcggcgcggcgtttttatccgcgcgccattgcctggcccaggaagttgaaagacgtcacttttggcatttgggtggtgattctggttttgatagccgcaaacgcctcttatgatatttcctcccgtgagggcatttcggaacgtgttttggaacagattggcgtgatggccctgctggtttgcgggttcaatttcgggttgggatatttgctgggggggcgcacgcgcgctgcggagtgcagccaggcattagggcagaagaataccaccctgtccatttatctggctttgacgtatgccagccccattgccgctctgggccccacgttttatgtactgtggcataatttatggaatgcctggcagttgtaccgcgtgtccgaacgaaagcgcagggatggatgaggaagggggtgcatccggttcggcggaagtccccggcagaattatgggaatttccatggtcggaaaaacgggagggagggttcttttgagccggttccaagtgacggctggcagattgttgaaggttcttttttatccactttcaggaaaggcagaggattccttcccgtgcaaaaagcttgaaattcggggaacgcccggtaacgttatgcacttgttatgcaggcgtcttctcctttgccccctctgtccccgcgtaccaagtggctgattgccctgtgcttgtgcgtgcttgtgatgttgctggagttcctgacgtaccacatggcgtaccgcatcggctatgatgaagggatgctgactactccgccggtggtggtgcagaaaagcgatgaaaaggctatgcagaatttgtcccgcttcatggcggatgtttttgcttcgcgcgagagcctggccggcattctggacaaccgggaggaacgccttgcatggatcagggatccggaactgcggacagaaactgcctggggtctcacccgtgagctgattagccggggtggcgtcgttcttgctcttcctgcggccagggaattaattgacgccggatacgccgccgggcactatcgggtatgggctccccgtgcggatgccgtggcaaaggctctgttggcggagcaccagtacacttccgcctacgattatttgaaaaccgctgaggagggatatgagaaggaaggaatggccgagccgctggtgcggacgctccagaccatgagttccattgaccagatgctgaacaggaatgaacaggctaatatgttgctccagcgtgcggtggatgccgctgcacatctggggccggatgccctccctgtcaggtccaggcttttagccgcccaaggaaggctggcacgtactacggggcgcattccggaatcgcgcgagtatttcaagaaggctctggctctttgtcctcagccggacaagaccactggagacctggccctggccagcatcagcatgggggaggccatgttggaagccggcaggaaggatgaggcacgggaattgtttttaaagggcctttccggctcggaaaatgcctcttacctgttgaatgactgcctcaatgccctgcgcggcctggcccgtatttctacggagcaggggaattatgaggaggccctggcttatctttaccaggcggaaggcgctgcccgcggcgtactgccgacggaccatgccttttgggccgggttgtatgatcagagggggtgggtcaacatcttgcgcaaggcctctccggaagcccgggcggattttttaaaggccattgccaacagctcggcttctcccgtcatttccgcccagtcccgcgaagggctgggcaaggcatggctggatgccggggaggggggcaaggccagggagaacctggaaagggctcttcagctgcggaagtcccatttcgcctcggatcttctgtccttgggccgcgtatattattccctgggacttgccagcgatatggcgggggacagggagggcgccctgactgcctatgccggagcggtggattctctgctgaaatgcgtggagggggcggaacgcagggatttgctggttcagtcttatttgtgtaaggcgtacgctctgtgtgacggagaacaatggaaagaggcggcagaagcttttgaggcggttcttcccatgctggagggggaacagaggtcggagaattacaaacagcttggacgctgttatgacgaactgggcatgaaggagaaagcggatgactgctggaaggaatccggttttccccgggtgcgcatggcatcccccgggcgcagaccctccgtgaactccagatcttcacggaggtaggatgcgaggggcttcgtaagacgttgcgaggcgtttattttgcttgatttgtgccgtctttttggctcaatgcctgcatgagttccgagcgccatttttccagtaagccctaccgccccgcacgcaagaaaaagtcttattggaagccggtcctctttttggtcctcctgggaggactctggttcggctacatccagtactggcctacgatagaagggtggttcaagccgaccattcatgaggtgcacagccagacgcaggccatggggcatttgcaggatatgctggcttcatggaacggttccgatgcagagctggcgcagatggcatcctccgtggacaagcaggtggaatggatgaattctcccgaagccagagattcctttgcatggcttttggcggtggaaatggaccggcgcggcatgctgaaagaatccgaacctatgctggctgctcttctgggaaaaaagctggctgcttcctcctccatgacggcggaggacaatacccgccttctgggcgtcagcctgaactgggcgcgggaattcgcccgccgcaagcatgatgctgtggcggaaaagctttatgaagtgattttgaaaaatacgccggaagaccaggtttccatccgtttagcgtgcttggagccattaatccattatgcatacgaccaagccaggtttgagcgtttttccgcgttgtgcaagcaggctgtttctcctgtcatgaggagcatgctgaataaaccggaggatgtgaagagcatggtgaaaatcctgttgcttcaggatactctgccagacaggaccaccgggttgcccggtggcacggggagtgcgattgcccgggagcttcttactaaattccgcctgaccgccaatccggacatgggccgcattattctgaatgaactgaagatgccgctgaacacgcgccggaagtattcccaggaggaattgaaggccatggccgaccagctggaagcggctctgatctgcttccgagcagctgaaacggagatggactgcacgccggagacaatgcttgccctggcacgggtaaggatgcagatgggggatttgagagaagcctcccgcctgctgtcccgtgcagaaggggctgccatgacgcttggcgtggatgctccccgtattttgagcggctccagcctgagccaggatattgcgtccatgcggtcccagcttgaaaaatacagccaggcagaggctttggtgaaacgggcttatgaagatgtgaatgttgccgcagctttcctgaaggcgcgggattacgatcaggcggtaaagtatctggaacaggcaatgaaagtggctcgtgaaaataccacgtttgttcaggcacttcagccggtcattctgaatcttcaggcggagataagcgccggcagggaacaatgggctctgtcggagtcccaatatggaaagttgattgcggagtgggatgcgttgactccggaagataaggaaaaactccggaataatctggcctccatccagttgggagagctttacaatgaaattcaccgcaactgggctggtgtgtgcctcaagcaaaaacgaaccacagaggcccgcagggtgctggggaagataggagaggttccggctgaagaaccggagaggcctgcctcgcgccgacgccgcagatagcagacccttccttcagttaggccgttccttttttggaaaggaaaagttatccattggcagatgccggaggggctcagagttcccagaggctccggtcgggagcttgactaaagcgggatacctacggtcagctgcgtgaggctgaaggggctttttaaggaaatgtgccgctttaatcccttgacgtcatcaaagagctttggcacaggttccgtttccctgtatcgacggatacccggcattccggagagaaagaatggattttaggccttcaacaagttatttgtctctttttggggcaaatgtaacgtttccggtatgatccatattctcaagcagagctgaaaaacagcttctgcagaaccttcagctgcggactttggctttctgtcttacatggctgagagcccttttcccatgaaccattttttcacggcggtcagctgcggattgacggcgggagcgcacagtatattttgcgaaaatttggctaaccgtaaggttgccctgttcgaaaagtttgaaaatattatctctcaccctcatggcttcctgaagcgctgcgtcagcgcccccgtattgagaatcggagaaataacgggtgaataaacgcttgttcttacagatcgccaaccgatagccctgaaaggccgttgtttcgtaagtgtaacgggtgatgtttttacaaggcatatgaacagaagttatgggaccgggtgatagaagcagtgataagcttctattagaataggttccatctcctgtaaaatccagaaaaaacacaatttgttagattgagtgcaaaaaatgcactactagatgcttgtggacaggttattgtggcgtgtcatccctgacataaaaacaaccgtcggaaacacggattttcaatttttcccctgcatgcacctggtttgtctgccggataagctgcttatcctggttttctaccagggcatatccgcggcgcagggtctgttccgggctgtgtgcttcaagacgtgcttgaataagagtgagttgtgaagataaatccgtcatgcgggaggcggctgcatgggataaaccggcctgaagggaagccagaagctgtgtgcgctcccggttcctgtgggcggggtggcgcatttgcagctgatgttccagtttgttaatatgcagcgtgttatgaaaaactctcgtggttgcggcattctgcagggtttcttccatatcgtccaggcgctgggaataaggagagagcagggaatacgcatccaacagcttcccccgcaggtaaacatccagtttcagcttggaacgcaagagggaatgccgagcggatgcatgaagagcctgttccattctggacagcttgcggagccattcagggccgtccggtgtggccagttctgcggctgcggtgggagtgggtgcgcgcagatccgccgcaaaatcggcaatggtgaagtccgtatcatgacccactgcggaaatcacgggaacggtacattcgtaaatggcgcgcgccaccgtttcctcattgaaattccacaaatcctcaatggagccgcctccgcgtcctacaatgagcacgtccacgggcgggagaccgttgaagggcgctccggaccaagcgcgcacggctgcggctatttcgtgctccgctcctgccccctgcacgcgtacgggcagcagataagccttcacccacggggcgcggcgttccaatacgtgccgtatgtcctggatgacggcgccggtgggggaggtgacgatgccgatggcgcgggggaacgtgggaattttctttttgtgttccgcgtcaaacaacccctcgcgctggagtttggctttcaactccaaaaagcgagtctgcaaatctccctgtcctgcagcttttacctgcctgatgaccagctggagttgcccccggtccgggtatacggtggcgctgcccaggacatggactttcatcccttcctggagccgtatggggcatttggaagccgctgccttgaaaaaggcgcagaaaatttccgctccctgttccttcagggtgaaataaacgtggccgctggtgtgatgcttgacgttgctcagttctcccaccacccactgggtgcccacagcgatgctgaccgtgtctctcaggcggtaaacgagctgtttgactgtgatggatttgggcgcggcgggcgtttcctccgggaattccataaattacggttcaaaggggatgttcagcgcttcatacgccagcatcctgcattgcttgatatccagcttgccggatgggagcaccgggatgcgttctacgggaataatctccttggggcaccagagggccggcagcccctggtcaatcaggccgtgcctgatgagggtgcgcgcctggtgcacgtaatccgtcaccagggtggtgagcagggctacggcctccccttttacggggtccggaatggtgacgacggctatccgccgttcttcgtccgccggatccagattccaaatgttcataatggctgcttccagggcttcatgaggcaccatttccccacctattttggaaaagcgggaaatgcgtccttcaatcttcaggaagccgaattcgtctgcggaacctatgtctccggtttttagccagccgtccacgaaaatatcgcgatccgtctccggaccgcccagatagccgggaaagatgttcggtcctttcagccagatcatgccggaagtagtgatgggaaccacgcgtcccgtgtgagggctggtgatgcgtatggcgattccgggaaggagggctcctacggaactctttttcatgccgggaatgaagtctccggcggcattggatggcgccgggtcaatgaagttgacggaacagacgggagaggcttccgtcaggccgtagccttcgcatggaatgatgccgaatttttcccggaaagcggcggaaaggtcttccggcagtttttccgcgccaacgatcaggtagcggacggttttaaaggtgtccggttcgcagcgtttcatgaaaccgcgcaggaaggtgggcgtggtgactaccagactgattccgtactgcttgataagggctcccagccgtttggcctcaagaggggaggggtaggtgaccatgtcgtacccgccgatcatcggataccatagcccgatggtgatgccgaagcagtggaatacgggcaggcttcccagaaacctgttttgcggttccagagtaatgcgggaggaacattgagagatgttggaaagaaggttgtggtgggtcagcggcacgcccttgggttccccggaagagccggaagtgaacatcagcacggcttcgtccgcgcctgtaggcgcgtccagccccagttttttaatcatgaaccccgctgtcaggaatttgatggcgaggccccagcgtttggcggaacctttaagcaggggaatttcccgctccatgaggatcagatccctctgagggggccacgggaaattctggagctttcgcatgaaggtatccgcagtgataaaccagtccacgccggattgctttacagagctggcaaaggctccttccgaggcggaataattgaaattcaccggtgttttcccggcgaacaggcaacccagattggctatggccgctcccttgcccggcggaagaatgatgccgacccggcggttcgaggtaatttttttcaacctcttggcaaaggctacagaaatggccagcagctggccgtaggtcagcgtagtgtcgtcaatgccgtcgatgacccggcaatcggaatgaagtttgaggctgcggaaaaggagggcggacagggaaccgtggagctgaggcagcgtggcgtatgcctgggcggaacattccagccacgcggaggtcaggcgcgccgccatctcggccccgggggccagtttggggagaatatgtatctggatgtccgcctgggcgtccgtatcggcctccgcatccagcacggagttcgtgtaaaaaccggcatagaccggtacgggggagatatgcagggcttccagggccttgatgacccgcggcggaatttggctgatggaacctttcacatgggagacgggaccgggcagaaatactactcttctgccttcgttaatgcgttccatgatggcggaacgcagcgcgacagggtcgctgcctccggcctggaacaggatgccgtccgctttagtggattccagatgggaggcggtggccgtatccggggggaggccttcttccaccaggtaggtcatgcggtccctgcccagttctttttcgaacatcagcagggttttataagatactttgttgaaaatcaacagatcacctgagtcggataaattggaggaaccaaaaatggccatgggaaaaggataaaaaattgcttagagcattttagcaacttaaagagccgggagcaaggaggaaagatatgtctccgggcgtttcgttgtcgttttttttgttttggagtgttttttgtcggcgggcgcagttgcctttaattcctccgccatgctgttaacgaattgtggtattgtcagcctgaggctcttttttctctgcttcgcaataaggatcactgaaaaaggtttgacatgagtttttataaaagtgtccgggcaggagagaggtatttttgtgatggaatactttcttgttgacaggaggctttttttttcgcataaaatacaaaaattcgggtatgaaactgcatctgcctcttagacttcgttccgcattacttgccggattcgcatctgcctcttccttttgctctatagcattggtcccttcagccgccgctgcggcttttgatttttcttgggatgaagccacgcataccctgaccgtcgccagctccgctgatcgaggcgaaggtgataacggcatattgctcagcaccaacaactcctaccccggagaactgacgagcaacgagcatttcgcggctgcggaaaaaatcatctttgatttatctgaccccggcacttcagcggtatggtttgtaggtgccccaacagtatcccaggccgtgcagataggggaaggggcggatatgtccggggggttgaggttttacaacggcagcagtaattcaacgctgacttttaccggggctgtgacgggaaacggcacgctctcccaagccggctccgcaaccaacaaacagattgactttacgggcaacgtgacggatttcacggggactgttctcatgaacaactctggaagcggcgtcattcgctttggctccggccgcgccattgattatgcgacaacggcaaccaagggcgtcgccgggacgggcgatttcagcatgagcaccacaggggataccctcgcctacaattatggcggcggtattgaaggagctcccgtttacgttaccaatgccattaccggcgcgaatggaaccctgagcgtggagggggcggctgatatggagtttgtgaaatctgtcgcggtgaagactttgaaagtcggcacaggtgacggcaggcaaacagccctgtatcttgtcccttctgaaaatatggcgtcagaagggacggatctggtgtttcgtgaactttccttcagtgttttgaacaacgccggaaacgggactctgaatgtgtatgacgccggcgggactttgaacatccattctacgggcagcggcaataccatcctcaacggcggggatttttccaccctgtacgctgaggacggtaccataaccctggttggcgacattaacgtaagttctcaattccgaggcgggaacaattccgccccgaatgtttccattggttcctctgagatgacggcaacgatgacggtagccagtttttacgggcactgggagtatgcttccgctgctgccaattccaaccgcacgacgatcactgtgaacagggggtccctgctgaatgtgacgtcttttctgcaaattgcccgtgacgggaagggaattctgaatattgaagaaggggggacagtcattgcgcagaaacttgatatgggaactgccatcagcggctggacggggactcccacaaacgggaaacaggcacgattaaacctgaacggaggcagtctgtatttgggcgcaggcggcctcacgcaagccaacaacgcggagctttcgcccggcgttgttaacctgaactccggcgttcttggcggtacggccagctggagcaccacgctggccgccagcgtgggcagcgcggataagacgctgacagtccacaccgggaaatatgatgcggccacgaagacgcattccgcgacggacgggcttgcgattacgcttgggaagctgacgggtacggccggaaccctggtgaaagatggcctggggacgctgaccgtaggagatgggagttctctttacggtttgactgtgaaggccggtttcttgggcgtcagcggagcttcggccgatgcgttcggcacgcttaccgtaaccagtctgaccgccatgacggaagacggcggcaggttctggattgacctgggggcagacggctcttcttctgacaaggttacggcaaattcctacggcaatcagcgcatcaatatggctctttccggtacggccgccggcacatatactgtatttgacggcggtacgggcttgacggataaggatatggtgcacctggagctgtacatgaaccgcggcttgagcgtggatgaatcgacaggcgtcagcattgaaaacggcgtcgtgaaggtaaccattaccggtacggcaagctctgaggtgtacacgctgacctgggatggaacggacggggaaagctggagcaacagcgctgtaactgcctggactcgggacggacagacaaaggagcgcttctctcagggggatcatgtggtgtttgacgggcagggaagttctctggtgaatattgaagggattgtttcccccggcagcatttctgtgagcggagacgccgattatacgttctccggcggaagcgttcaaggggctgggatcttaaccaagagaggcagcggggaattgtctctgcgcacggatatggccaattggaccggggctattgagctgattgacggcacgctgaatattggttctgatctggcggctgttgaaaatggcggaaggattactgttattggagcttctgcgcttggcatggggggcaatatcgccagggcaacgttgttgaacgctgatttgactatatccgttgcagaaggtgattccttttctcatacgggcgtgatttccggagtaaacggcctgacaaaaaccggcggcggtgttttgactctgggcaataacggaaataccttcagcggtgatttgacggtgagggaaggcttgttgaagatgggcagcgaatccacttcttccggcggcgttctgggcgccttcaacatcgcggacggcagtacccgggtgattcaggtgcttgacggcgcgacgctggacatgaacgggagggtggataaccgttatgccctcactttggcgggcgacggcgtggacggccggggagctctggtcaataatggcggaaatgcaggaacgggtagcatcaacttcccgaaactgattcttgctgctgacgcttccgtcggcggcacggggacgctctgcatcgtcggtccccgctatgcagaaacgacgattgatctggcagggaacacgttgaccaagagagggaccaataccatggctttggttcacacgacgttgacggcaggcactttttccattcaggagggaacgcttcagttcagttctacggggagtgacagcaatgcttctgccgttgattttgtggtgggcgcgaacggcgttttggatatcagcgggcggtctgtaaccgtgaagactttgtccggcgccggcggcgtggtgaagctgggcgataagactttgacgacgggaggcgggatttttgacggaattgtctccggcacgggggccttggttttgacgggcgcgggagacggccagagcagtctgacgctgtcaggctccaatactcttacgggcggcctgacggtaacccacgaaaatgatcgtattctgctggggacggaagataaggtcggcgtatgggccggcgcgacgctgggcggagccggcaccctggtggtggtcaacggctccctgtctaccgccatgagcaacgcggaaggttctacggccaggatcggcgtttccgccggagaaaataagacgatttctctgggaggaacgtcttccgatatgctgacgtttataaccctgggcacggggagcgttttgagcggcgtgacgggggatatctttgtgggcgaaggcggtctggatggcctttccctggctctgaatacgagcaatatggcgtctttgcctctggatcaggcgttgaccggagcggaaggggaggccaagattcttcagagtgaaggagccaggctcaccatcacggatgccgccagggtttctctgaccatggatgcggtagtcaattctctgttgaataagaatacgtatctgacgctgactgatggacggctggtgtgcgacgatttcaacaatattaccctcactaccactggcggcgtttctctggcgagctacggcttgcgccttgtgggcacggaaggaggcagtctgttgctgacgtccaatccgcaaaacctgtatttggtttcttccgacgcggctactacggatccgcatgcggtgaacgagtacaatgccctgagttcctacgccggcgttctggttcaggcgggggaaacgcttaggctgaatcttgccggcgcccttccggaaacggcgcaacacgcaggcggcatggtgattaacaatctggcgggcggttccgaacaggatgcttccaacaaggctcggctgcttgtcgataatacggatgccgcaggtgggaatgtgaccgttatcctgaacaatgaacagcttcctttggcagggacgagcgttgtggatccgactccttatggcggggatacctctttctacggggacattcatggcgtcaatggcgttactctggttaaacagggcgtcggcaagctgaccgtcaacggctctgttgtgacggacatgctccgtgcggaagaaggcgcgctggtcatcagcggcgccggaagcgatattcagcacattgttttgaatggtacgggcgatgcagtattgcagattggagggaatacgactgctggcgatttgtcggaaggagccaacggcggtaccctggttctggccgacgccgctgtgctggctctgacagaaggcgggagcctggctaagagcggtatcaccggtaatggatctttggctctgtcaggttccctgactttgtccggaggcgcttccataaatggcggtatagcgcttgttctggctgaaaacggcgttttggatatcggcagcacgacggcaaattccgcggcagatatttccggttccgggacactgaagagttccgggggaattctgactgttaataccggaacaacaggcgatatggcctgttttgggggcgctctggtgggaaccggcaagctggtgattaacgggcaaaccgggcagatgcttcggacgggcaatgccgggtacgatctggaagtccattccggcagtaagctgacgctgaaggggacggaagtaaatcctggcattgcctatggtcatgtgacgattgccgactcctctacattcaggattgaagcggtcggcggtgctgaaagttctgcaaataccattctgaatgtggaaaatatgacgttcggcgccggttctacgacggagtttgtctataatctgaatcaggacgtcccgtttgaggcgggcttgctgacggccggtacgattaccattgaggacggcgccagatttgtcattaccaacctggaagaaaactcacggatggattcatcctctgacttgcaggacgtcctgctgatgtcttctaccggtgaaattatcggcctggcggacggggacagcctgaatgccgttctctccgggctttttgccgtttattataaggacgccacgctgagccgcgacggaagcgacattttgttcaatgccattgtgcgtgatgataatctttttgatcccgcggcgacgacgagcaactccatggccggagccgggctgttgtggaacgcccgtcacaacctggacgcggcgtctcagctgaggcaggtgatggattccgtcagcaccatgattacgggagataatcccgacttggcgggggcatccagggctttggcagcagtggctgggagcacggtcaacgcgctggggacggcgcaaagggacgccctgcgcgaccagatgggctggatcaggaaccggaccaccctcatgggcgtcaacccggcctacgtcaacgacgacctcccccgcttccacatgtggatggaaggcacgggctcctacgccaaactcgacacccgtggcgatgaaagcggctaccagctcaccacctggggaggcacggtaggcgtggacgcggacctcagcgaccgcctcacggtgggagcggccttcacggtcggctacggcgacctgacggccggcgcggcggacagcgccgacgggcgcctggacagctactacgccagcctcttcgggcgctatcagaacaaacgctgggcgcacacgctcatcctgacgggaggatggaacgacgcgaaactcaaccgtacggtcaactacggggaaggaagctacgggacgcagggaagcaccagcgggtggggctttggagcgatgtacgaactcacctgcgacgtgtacctcgacgaaaaccgcagcagcgtgctgcagccgctgttcaacgcctcggtggtgacgacgcggatggacggctatgaggaaacgggagcgggcaacgcgggcctgaacgtcggccggcaggactggacgacggggacgctggcgctgggcggccgttggatggggctggtgggcagcaacatcttcggccgggaatcgctggcggaaatccgggtcaacgcggcgcaggacctgggagaccggagaggggaaacgaacgtctccctgctgggcaaccccggcttcgcgcaaagcgtgagaggggcgaaaacgggaacgacggcgctgcagctgggagcggggctgagcgtgccggtggggacgaaaggaaccatcttcgtcaacggcaacgcggacatccgggacgggtccagctcggtgaacggaagcgtcggctaccgttacgacttctaacaagaaagaaaacacaaggagggggggccaccccccaaaggccttcctcctgaccctccagggccgttccggacaactccggaacggccctctgctgcccgaaaatcccacaggtgcgcccaagggtcggactggatagggcaaaaacaaaacagcagcaaaaaaggaaagcgccgcccctcccaccccccggagccataaacctcatccccacctcaaatctgtaaaaacgcgccaaatgtttccggaacccttttccgctatccggaagccggaaaaaaccgaaacgcgagcaatagggccttttttatgcgatttcagcagttttccattccaataccgcttccgcccgcagttcatctccgtgcatgaggtggtgggaggtgagggagtcccgtaagaacagcagggatttcatggagtctcccgcatgggtttcttttctgaaatgcaggtgaattcctgtcagttggtggttttctagccaggagtccggcagggagtccagagcccagaccaggtaggcggcattgttgatgtgacggttgaaatccgtatcacggcgttccgccgtccattccctgatactcggcagaagtcctgaaatgtccatagataccggagctaccgtttctttgcatggggtatccgggaaaaagctgatgtgcctgtttaaggggaccggccgcctgcggcgtatatcaatgacagcccacaggcagcttgctgcaacaatgcagttgccttgggcatccctgatttccaggttgcggcgcgccagcagaggcgtttcctgggccgtccaggtccggagttctaccgtttccttccaccggggaaggcgattgacggacgcatccaggcgcacttccacccaggccaggctgcgggacgttacaaaatcatagccgaaccctaggcaggaggcatgggcttccgctatttcctgaaaccagtgcagaaccgtttccggtttcatcagtccatccgcgccgctttcgtaagtgcggacggttgcctgaacggaatagatttccctggtgctggcatgttccataacatcttatgctagtaaaaccattctttcagagccagttaaaaacgggtaatattcaaccgtttggcatgccacctctcccggtatatgaatggcctccgtattttccgggctgcctgcttggggcgcggcatgcaatggaattcctttcagcatccgctgaggtggacggcattccctgatttctaaagaatgctccggaaataggcaatggttttttccaatcctttttccagcgtaatatgaggtttccagcccagtttttcttctgcaagccgaatatccggtttgcgctgggtcgggtcgtccagaggcagaggacggaagactgttttggaagaagagcctgtcatttcaatgactttttcagccagttccagcatggtgaattcctctggattacccaggttgacagggccggaaaaaccttccgtattcatcatgcgcaccattccttccaccaggtcgtccacgtactgaaaactccgggtctgtctgccagtcccgtaaatggtgatgtcttcccccttcagcgcctgaacgatgaagttggagactactctgccgtcgttcgggttcattcgcggtccgtaggtgttgaagatacggatgatgcgaacgtccaccccgttcatgcggcggtagtccataaacagggtctccgcgcatcttttaccttcgtcgtagcaggagcggacgcccacgggattgacgtttccccagtaggtttccggctggggatgaaccatgggatctccgtatacttcgctggtggaggcctggaggattctggctttgcaccgtttggcgaggcccagcatattcagagctcccagcacggaggttttcattgtgtggatggggtcaaactgataatggggaggagaggcggggcaggccaggttgtagatttggtcaacttccatgacatagggaacggtaacgtcatggcgtattacttcaaatccgggataatccgtcaggtgtaggatgttttgtttgctgcccgtgaagaagttgtccatgcagataacttcatggccttccttgagaagccgttcgctgagatgggagccgatgaagccggctcctccggtaatcaaaatccttttgctcatgatggcatgtccatgcgtttgttcgttccgctgcgccggaagggaagcaagcggaaagttttcccctgtccgtgcgttgcggttcaatgtcacatatccgtcacgggaaggcaagcgtatagcatcccggacgggatattacagggatgtccgggaaaggcagggggtgaaccaggaaggtttttccgtacgggccgggaggcgaattccggttggttccggctgtcccgctggcaaattcaggatttgggaatcgtcagcagaaagctggctccccccagggtgccgaattccagtttcaggtctccccccagggatcgggccgtgtcctttgccagcgccagacccaggcctacgccgggtttccggctgttggtggcgtcttttgtgcgccggaagggcttgaagacaagcttacggtttttcggggaaattccggggccgttgtcgcggaagcggatgacgatgttgtggcggtccgcctggacggtaagctggactttggcgttttcccccttggcgtatttaatggcgttggaagtcaggttgtccataatttgctctacagagacggcgtccgtatggataggaaggatacggatgggctgggccagggcaaaggagaagctgatgcctgcctcccggaggcggcggtctattttttccgcaatgggttcaaaaagctcctggcaggtgagcgtgtcccgcgcacgtcggatggcgttccgctgaagccgggagtaggagagtacgttttcaatcaggtgttccagacggcggcattcccgctgcatgttggcatagtattccggctttttctgttccggcaccatgccgtcttccagcatttccgtgtacagggagaaggacgtgaggggcgtccggagttcatgggtgacggcggagacgaagtccccgcggcgctgttccaggcggaaggttcccagcatgagccagatgaccccagccgcacccaggagcaccatgctccagatgagggtgagcgtccaggtcagcatttttttgtggtcctggagaggaacggctccggtgtctcccggaaggaaaatcagaggggcgttggcaaaggggagtgcgcccgcctgccggggttcctccgggggcggggaggacgggttaaaggttgccaggcggctgtggggaagcagcatctttacctggccgggcaggcgtctgttcagattgtccatgttcatcagggccccctgcaaataaatgccgcggctggtgtgcacctggcgcaggatgtaaaggttccctccgtcttccacgggaacgaaggaagtgacagtttccacttgtgccggagagccggataccgttggctccggttccggagattcatgcagaatttcattccggatatccgtccagaggtttccgctggacggaacggaggtaagggaggagaccttgccgttcagccgctggtaaaggtccttctgttcattcagccgcccggcaagctccgggggaagagcggggccggttacgcgcccggcaggggaaatctgaatgaaggctgtaacgtagtccggcaggtaggcggcgagattggaaccacgggttgcttctccgggggccggggcgcccatcctcaggtcataggggcgtttgtaggcgtaaacgggctggtattcaaaatagccgcgggcctgttcgaatgtgatgaaggaggtcagaaggcggtccatttccagcttggcttcatgggccagggcttccaccctgatacgctgttcggaatggcctgtttcttccgcctgcaccagcagaacatgggtgagccatccgagcgtgccgatgaccagcagcaggctgattgccagcagaatgatgcgtatgcgccggttcacggatcaggaaacgaaggatgaattccagcggtagccctggcttctaagcgtctccaggggggaggcggaggcggccccgagcttgtcccggagacgcatgacggtcatttccacggagcgcgtatccgtcaggcgcgggtccacgtcccatacgcgccggagcagttcgtccctcgtgataacgcggttggggtgggtggccatataggtgaggaattcgaattcccgcgcggtcagggaggtttccctcccgtctttaaaggtgatcaggcggttggcgctgtccagggtggcgccggggatcctgatttcccggagctggcgcggccgttccggagacctgcgcagaacggcctcgatgcgggcgagcagttcccggatgctgaacggcttgacaatatagtcgtccgcccccagcttgagcccctgcacgcggtcttcctcctctccacgggccgtgagcatgatgacaggcgttccggggcgttcctcagacatgacctgcagcacctggaatccgtccgcgcccggcatggccacgtccagcagggcgaggtcgaaattgcgttcccgcacggcatggatggcggccaggccttcttccagagccagcacttcgtagccggatgcggtcagaacgtccgtcagggcatgcctgatgctgtcgtcgtcctccgcaatcagaatggtataggctgaatcactcatcgtttgattctataaaaccacaatatttcccctgttgtatagagaaacctgcgccctttcagtaacaatgccataacaggccgtcttcccggggggggcttagtgatgccggagttcccggaaggggggaggaaggctgccggagggaatttcaatggcctccatgggaccggggacaattccttcaaagaacggcgtacctttgtaggaaaggatgattttggaatgcaccatgccgcccgtagtctggcgcaggaaatccgcatcccggaagaccaggagcgtctttccgttttccccgggtacaggacggcactggaaatcgccaagcggtgttccgtcagccgccgtcatctggacgggcagtatataggcttccgaaaaggaaggagcgtaaacaccccagaaggaagtgagcgccataacgacgacgatcacgatgccgacaatgatttttgtggaggtggacatgcggagggaggtattctgacccgtacgtccacctccggtacggtggccgcgcggcgtcagcgttgttgaagccattcggcggcctggggggcgtaatacgtaaggatcatatcgaccccggcgcgccggatggatattagagtctccagaactgtttcccgttcatccagccagccggaagctgcggcggacttgatcatcaggtactccccgctgacatggtaggcggctatggggagggtcacatgcttccgcatggcggccataacgtccagatacaatgtggcgggtttcaccatcaggatgtccgctccctccgcttcatccagctgcgcttccctaagggcttcccggatgttgccgggatccatctggtaggtttttttatcccctgccttgggcgcgctctccagagctccgcggaacggcccgtacagcgcgctggcgtacttggcggtataggccatgatggaaacgtcgtccagggcttcggaatccagggtggcgcggatggcggccacgcggccgtccatcatgtcgctgggggagacgatatccgccccggcatccgcgtggcacaatgcctggcggcagagaacctccacggaatcgtcgttaaggatttccatcgttccgtcggagcggaattccactaggccgtcatggccgtcggaattgtaaggatccagggctacgtccgtcatgacggtgatgcctggcacttcgcttttgagcgcgtaaatggtgcgcgggatgaggccgtcagggttgcaggcttcgcaggcgtccggcgtttttttcttatccgggatggctggaaaaagatccagcgtccggatgcccagatccatcaggcgcttggcttcctccaccagtcccttgacgctccagcgcgtgcagcccggcagggaggggatgggctggttcccggtcccttcatggacgaagacgggatagatgaggtgttccggggaaagggaggtttcccggataaggccccggatgttggcggattttctgttgcggcgaggccgtatcggtagattcatcatggtgttgtaatgaaaaagtttttaggaatgcatggcgttccggaacggatatgctcagggagccttgggggcctccagttccagcggctgttccgcatcggccccggcgagcatccagccgccgtctgtttggatgaagtgcaggttgttgacggagaattcatttccaactgctgtacgcacgccgatggtggccttgattccggcgcagccgtctctggcggcgggaatatacgccgctttgacttcgggaacgtctttttcccttaccctggtgtgcggggtgggaatccttcccatgactgttttcaattgggagagcgcgtcttcaaattccttcacggaggcgaagttggacggggccagcatgcgcatcatggccaggctgtcccggttcgccagggcacggccggcggcggttacggcctcttccggcgtgggaaaggacagcggaggatacgtccggtggaaatccgccatgatgcgggcggtggtggattcgtccggtttcagattccaggaggcgaaagcgtccgtcaggttcatcttgaagacgggaaggccgtctgtgggatccttggttttttccagcgcatagcggtaaataagagcgggtttgtctatgtccggcatgctcatgcgcggcggcaggatggtcatggctccgatgctgtggatgtccttgccgtttttcttcgcgttgtttttattggcttcctcctgcaggtcctcttcacggctgttcggggccatctggtcgtccggatgggggctcaggggaaccaggatggtattcggaaaggtcatgaagctgaggtgggtaggctggatatagcggttttcctcccttctgtcctggaggcgcatggccttgaccacgggaatgaggcgtgcgctctgggtaatggcggattccgtataatacggggaaacgagcagggcggcgatgtgggccgggttattccccttcacggcccggatgagcaggttcttgagttcgtcgtccgttgttcccttgacgttttcctggcggaaacgcttgatatgttccagggcggctttaacggcggctacggagtactggtgtgcgaggacgaaaattttcttcttggcctccgaggacagtttttctgcttctccccggatgcggtcgtcaaagggaaggaatgtgttgtcaaagcttccgggagtcagggacgcctgccaccggccttcttttttcaccagggccacggcggtggccgcataaacgtacgggttggccttgtccggcagcaggatgtaggccattgccaggtcgccttcggcaatgatggagtcttcatccacaaagggcggacgttccggggccgctccggtgacatacccctgaaccgcctccatgcgggaaaggatgcttttcagcctgagttggcttacaaagggggaagtggcgggcaatgacttgtacggctcgtgtttccagtccgttttttcctgaagggcgcggagcagcagtttggccgcgttcaacggtgtgctctggtccggaacgggacccgtggacggagccttgttttccgcagcctgatccatattgatccggaaacggacaggagcgccctctggcggctggccgccccgggaaaacccgcagcagaggcagaggcagaaaagggagagggggaggatgttcatgaccgctggccgccactatggcataaacggctgcgggtgtaaatcattcgttgggaatgttgacgcggctgttgccgcagggcggacaaccctgaactccggggaaaagcgaacgaaaaggggggaaggatgcgtcccggaagaagagtccggaagccggaggaaagggcttttccgcggcgttcatgccttgaattttcgggaagaaggtctttttgcatttgccaacagcgtttaagagaggtttactgatgcgcgtatgtccgaacacaaggaaagaaagactcttgaagaacgccaacagatgtctgatttggaacggctgcgccactcctgcgcgcacgttctggctacggccatttgccgcctctggccggatgcccagctggccggcgggcctgccgtggataacggtttttattacgacgtggagctggaccaccgcatcagcacagaggactttgaacgcattgaggaggagatgaaaaaagtggtgaaggaaaaccaggttttccagaaggaagtcatttcccgcgcggatgccatgaagatggcggaatccggggagctgggcgccctgggcccccgcagtgagccttcccgcttcaagattgacctgttgaacgacatcccggaagacgaggagatttccctctaccgaaacggggattttacggacctgtgcgccggtcctcacgtgggccgcacgggcaactgcaaggcattcaaaatcatgagcgtggcgagcgccttctacaagggggacaaaaaccgccccatgctccagcgcatttacggcacctgtttcccgaaccgcacccagcttgacgaacacctggaacggctggaagaggcgcggcgccgcgaccaccgcaaactgggccgcgaactgggcctgttctgcattgacgaatccgtggggcaggggctcatcctctggaagcccaagggggctctcatccgccgttccctgcaggacttcatcacggaagagctggacaagctgggctactcccaggtgtacacgcccaacatcggcaagctggacctgtaccgcacatccgggcacttcccgtattaccaggaaagccagtacgcgcctatcccggaacgggacgccatggaaaaactcagccaggagggggcttcctgcgcggaactgttcaacggcctggccaccggcaccattgagggctatatgctcaagccgatgaactgcccccaccacatcaagatttacgcgaatgacgcccactcctaccgggaccttcccgtgcggctggcggaattcggcacggtgtaccgttgggaacagagcggagagctgggcggtatgacgcgcgtgcgcggtttcacgcaggatgacgcccatatcttctgcacgccggaccagctggccggggaaatccgccagtgcctgggcattgtgaaaactattttcggcacgctgggcatgactgactaccgcgtgcgcctttccatgcgcgacccggaaagcgacaaatacgtgggttccccggaaaactgggacaaagcggaacaggccctgcgggaagccgcggaatggctgggggcggactacagcgaggaagctggggaagccgccttctacggccccaagatcgacttcatcgtgcgcgacgccatcggccgcgaatggcagctgggcaccgtgcaggtggactacaacctgccggaacgctttgacctccattacaccggagcggacaacaagccgcaccggcccgtgatggtgcaccgcgcccccttcggctccatggaacgcttcacggggcttctgattgaacactttgaaggcaaattccccacctggctttccccggaacaggtgcgcgtgctgcccatctccgacaaggtgacggatgtggccgccgcgcatcgaaccgccttggccgccagaggcgtgcgcgtcacggtggatgaaacgccggacaaaataggcgccaaaatccgcaatgcccgtctggaccgcgttccctacatgctggtgctcggccagcgggaggcggaagacggcaccatctccgtccgccaccgggacaagggggacctgggcgcgatgccctttgagcaattcgcggacctcgtagcccgggaaatcgcggagcgtcatatttctcccgtgatttgagttgccaagttattccttttagtttagtagtatccggacgtgccaaccaagccaacgaagaataatgacggaaatcgccgccgtgaccgcggcgatcagactcggatcaatgaacggattcgcgcgccccgcgtgcgggtagtgactgccaacggcgaccagctgggcgtcatgaacacgcgcgacgcgctggaaaaagccaaggctctggggctggacctggtggaagtggccggcaatgccgatccgcccgtatgccgcgtggttgattacggcaagtacaaataccagcaggccaagctccagaaaaacaacaagagccgaaccgtcaagcttaaggaaatcaagctccgcatcggtacggataccaatgactataatgtgaaaatggcccgtacggaaagctttctggatcatggccacaaggtccgtttccagctccgtttccgcggtcgtgagaacgcccaccaggagcttggctacgacgtcttcaacaaagtcatcgcggacatgaagaccatggcgcaggtggaccaggccccgcgcctggccggcaacaccatgcacatggtgctttccccgctccctgcccagcagcgcgtgaagaaattcaccgcccacctggataaggacttcgattccgaagactccgcctttgatgcggaagacgacgagtaaaacggcattttttctttttcaggctttccgcccttataaggcggaaagccttttttacgggagaatgcttttctatagagacccggggaattctcccggaggcactggaggaattgtttctttccgttcaatgggaatctggaaaccgtctggaacgcctggagaaggtattgctccattacgaggctgtgttctccgcttgggatgagaacagactggcggggctggtagccgtcatggatgacggaaccatgacggcttatgtccattacctgctggtgtatcctaggtaccagggatacggtgtcggttcgtggctgccgggtatttaagcatcgttctcacttcctgaagggcaggaatggttttattccgggccggacgcaggaggctatgcgttctattcctcctacgttcggagaaatcgggatggaacgggaagaaggtgaataatatctcaattttctttggacatccgtttgcagaaaggctgcatgcggcacatggtggcggtgcgccagagccattccagggggccgtacaggaaatggcttagccagaggcggcaggcccatgcctggaggaggaagacggccacggccgcgcacaggcatggccacggtcccatgtcctgggccaggcccagcccccacccgaagaagaggaaggtgaagaccagcgtctgggtgacgtagcaggtcagcgtgcatttgccggcgctgctgagcagccgggtgggcaggggaaggccgggatgggtgaacagcaggacggcggcggagacgaaagccgcggtatagaagaggttttcccatgggtgcaggagacgggctgcgtccgcttccagaggggcgcccagctgcgggatgaggtacaggcgcattgccagcaaagccaggaacaggagcccggccacgcccagcgtccgcaggaacaggctgcgtttgttgggcgcgtcttcaaaggcgcgccatctgcccgccagcatgcctaggatgaagaggcccagcgtctgccagaggcggccgctgagcaggaagaactgccatttgcccgcctggccctgcgtcaggttccacagggccgcctgaccccagctgccgtgggcgtacaggaattcccgcgtggggcccgcagccggggagcccgtatggaaccagccggaggagtggggccaccagtccgccagcccggcatggttcagcaggtccataagcatgaccggctgaatcaggcacagggcgcagagggtgatgagcaggggagtcccgcatttgtagagcatgaccagggcaaagcccagggtaccgaagagggtgaggatgtctccgtcatagaacagggtatgcgccagacccagcaggaacaggagcgtcaggcgccacatgaagcgtttccggaagtcgattccctgctgctcccgcctgtccagctggatgaagaagctgagtccgaacaggaaggagaagagcaggaaggatttgctgacaaagagatgttcataggcccagtccgccgcgctgttggccgcagcctgccatccttccgccgggggcatggggagatagaggttgaagtggtcgtgcgtgtggacgatgacgatgcccagcagggccagagcccggaggatatccagaatggtgatgcgcgcggccgggggaggcgttccggcgggagtccgggcggtcatggcgtcagcaggggcgggaaaaggatgggagaagttccgccgcgcgcctcctggcccattggtctgcttccagaatgggggccagttccccgcggggatccgccggggtgtggtcgtccatgatggcctccaccagtttccagatgccggggaaagagatttggccgtggatgaaggcattcaccgccgcttcattggcggcgttgtaaacggctgccagggtgctgttgccggctccggccctgcgcgccaggtccagggcggggaagacatccgtgcggggggcctcaaacaccagccggccgatttccgcgaaattgagctgcttcagggagttgggaacgcggtccggccatgtgacggcgtactggatggggaagcacatgtccgagctgctcatctgggccagcaccgtgccgtcccggtattccaccatggagtgcacgatgctctgcgggtggacaatgacgtccactttttccatgggaacgtcaaagagccagcgagcctcaatcatttccagccctttattgaacagggtggcggagtctatggtgattttgcggcccatgctccaggtgggatgcttgagggcctgttccagcgtaacgtgttccaggtcttccctgttccaggtgcggaagggtccgccggaggccgtcagaatcaggcgggagacggcttccgggccgccgtggttgccgttcaggcactggaaaatggcgttgtgttcgctgtccaccggaagcacctgcacaccggcccggcgggctttttccatgacgatttgcccggccatgaccagaatttccttgctggcgatggccaggtccttgcctgcttcaatagcggccagcgcgggcttgagaccggcggttcccacgatggagattaacaccatgtccgcctccgggagctgcgccaggcggcacagcccttcttctcccgtttccacctgcgcgccggggagcgcgcgcgccagctcgtccgctccggatgggttaaagatgcatacgctgcgcacgttgaattcgcgcgcctggcgggccagcgcctccacgctggttcctgcggccagccccacgatttccattctgtccggaatatcccgggcgactttcagagcgctggttccgatggaaccggtggagcccaggatgacgacgcgtcgtttctgcataacggagaagcatcatgcaaaaaatacggtcccttgacaagccggggggatgaaaattttccccgtgccgcatgggccgttttcccgtcagcccggttttattccggcgggccggggaaaggccgccacgcgttcgtgccgcaggcggtttgtgccgtgggttgctgcgttcctgctggctcgtcaagcagggatggcgggaaaagagcgggcctggaacgtgaaggaatgttccgccgcatggaaaagggttgtattttcctccggagggcgtataggatggcacgaatgaagcgcatcgccgtgtatgccggtagtttcgaccctctgaccaatggtcatttatggatgatcaggcagggcgcgaggatgtttgatgagctgattgtggccatgggcgacaatccggacaagcgttatacgttttcccatgaggaacgcatggatatgctgcgggtggcgctttccgacatgccggatgtgcgcattgccgagttccacaaccgctttctggtggatttcgccaatgaacacggggctacgttcatgctgcgcggcatccgttccacgcaggattacgagtatgaacgcgtgatgcgccatatcaatgcggatatggcccccaaggtgtgcacggtgttcctgatgcctccccgggatacggcggagttgtcctccagcatggtgaaagggttgattgggccggaaggctgggagagccaggtgagccgctatgtcccccataatgtattcgccatgttgaaggagaagtaccgggaggtttttccgcgttcctagcggagattccggatttccgttccgttattcgctgtccggtggagagggggcaggggcggaacgcctccgcctccttctgtctttctgctttctcatgcgctggatgacgcgggctcttgcggcgcatcggcccgtttgcgtttgttccacagcatcgcacagttccctgcgcgccagaaagcggttgagttccctggatctgtccgcatggcatttgacggcgatgcccgtgggcgtgtgcctgaggtaaacgcagttgttggttttatttactttctggccgcctcgcccgcttccgcggacaaagctttcctccagatcctgttcacggatgcccagggcctccatccgttcccggagagctgccagtttttcaggcctgaccatagccggaggattgcagggtgttaacgcgctgccggacagcatgggccagcatgtcccggctggcggccgtcatggggcgaaggctgacggcaacggttgatccgtcagtcaggcggaggttcagccgtccgccttcccggtccgcggagcgaatctgctgccagaagaaccattgcatggtgcgctgcgttctcaggaacggcaggatttccactcccaccggggtgacgatgacggccgcgtgtttcaggcagcggctccccgcagccaggcagagggcggcgggaacaagcgccgcggcctgcatggcccacaggggggcgggcaaatacggggtaattgtatcatatcccgtgagctggaggaaagcggcagtggctgccagaaggaaccccgccgccgtcaggatggcgcctgaccggttccgggtgaagcgcagctcccgtttccggacgggaatgtgccggatgtcctccacgcccagaccggcctgaaccggacggggcgcggaagcgggaagatggcgttcaggctccggcatagacgcccgggaggatttccttcgtttcgtcggagtcgttttccatcagcaaggtgccccggagaacggctccgtcctggaagtggaagcgtccgcgcagggtcagcttgtccatgcctgtcagggagggcaggcccagcccgtccagggaatccaccagcttatacagtttggaatccaggtccaccaccggggtattgccctgccgttccggagccagggccacgttgccgtgttcatccacggagatggcgtccgaacggagcaggaacaagtcggaagtggtcttgacggggaagaaacgggaacgcgggacattgacggccctggcgcccgggaagcattcgatgcccgcgcccatggccgtttccagctggtacaccggggcggattcctgatcgcgggggttgagcgtctttttattgcggatcatgggcagcgggagcacgccgccgttggcgtccagaatttccctgagggcgtccaggcgtatccagagcgtattggtgttgaaatagcggtgcctggagatgttctggaattcaggaatatcctcatccgggcactgggccacttcccgcagaatcaactggccgtccgatttcctgaccgccaggtggccgcctttcctgtccgcctccgtgcggcgggtgacttccatgacgaagggggcgccgctttccgcaaaccagcggaggaagttcatgtcaagctgggcgcccagattgtcggaattggagacaaaggcgtatttaacgccatccgccagcaggcggtccagccagccggaccccagcagggccggatacaggtccccatggccgggcgggcaccattccagctccggctgttccgggcagctggccggggagaggccgtccgccaggattttgggaacgcggttctgcatcagctccacttcggcgcggtccgcaaagccgtccgccgcgtatttttccaggtaggccagcgtgtccgcgctggtggagaaagagttcatcagcagaaggcgcacaggcgtgccggagagggagcgcagatgtttcacctgcctgacgattaaatccaggaacgtatcctctccttttactttcagcaggcttttcgccttctggaggcccatgctcgtgccgaggccgccgttgagcttgatgcagacgcaccgggaaatcaggtccttgtccgccgcaggggtggaggccgtgatgtcccgccagtcttccacctggtcggcgggcaggatgtccgtttccggaatcatgccggagtggttggaaacaagggcttcgtaacaacgggagaaagcgttgacggccgcggctgaaacgccggcggactccatcttttccgcaaaaggagtgaacgtactcattggcggcttttgtacaaaatgcccggaggaggctcaagcattatcagcgtatccggaatgcccgcgcgttttctttttcctgtggggcctgctccggattatctggctgccgtcacccggatgcgccgatagtccgccacccattgggaaccgtcccataactcatctttcagggaattttccatttccttgaaaatctggatgcgctgttcttcgtggaggtttttcaagtcttcccggaagaattggacggcccagttgcgcaggccgtcaggaccgtctttcaacggcgtggggcggtcaaattccttcattgtttccgggtgaagccctgcctgttccagcacgctgccgtattcttccgcggcgggaaagtaaaaacgcgttgtgtacgggaggctcctgcgttccagggctgtccggaaagcttccctgatgcggagaatattgaggcgggctccgaattcgcagaccagtttcccctgcggtttcaggacgcgggaaacggcatttaagagagtcccatggtccggtatccaatggaaggccgcattggagaaaacgatgtcaaacctgttgcgccagggcatgaggcgggcgtccagcacgcggaagtccatgccgggatagagccggcgggcttttgctatcatttccgaagaggagtccagaccggtgacggaggacgatttttccagcagggcgtgcgtcagcgtaccggttccgcagcccaggtccagaatggactggtctggattttccggtacgcaggagagcagacccctgccgtattccgcgacaaaatcgtgtttgttttcgtaccattcagcgttccagtccatgacctctccatcgtagggaaaagggggatttttttcaagagagaccctgtctttttttcatggcatttttcccggagggcctctgtccatttctccgtgccgtgccgggattcttcttgcgttggagggcgggaaatggttaagataagcttactatgaaagcaacagccctgttcctggcggcttccgccctggccgcggtttccgccgtcgcctatgacggatacggttatgacccccggcccgcaagttcctataacaatactatcagcggagcggcccacatcggctatgattcccggtatgcctataaagacgtggtggcttcctccgtgctgaaccgcagcggcgtgtttaacatcggcggcgagctgaacctcaacctggtcagggactggaagcaggaaatcggcgcggaatacatggctttctgcgacgggctgctgagcgacaaggacgcctttgacgccagttggaaggctgtcaaagagctgttccccaatctttccttccggggcgggtatgagttgaattacggtggcctcccggggtatttgagcaagcacatggggaaggctccccattccctcgcccagtccgtcacggcggggctggcgtatgacgatccgggccacggctattttggctccctggatgtgcagtacggcttttacggcatgatcggctggcgcattgacctgaacgcgggcaagcgctggagcggcctgattcatgaaaaggtggatttggaactgagcgccggaacaggttattcttccagttactgggggcccggcgtagccgggtttgaccaggttaacatcaagctggcggctcccgtgcgcgtaacgggtgtggactccagccgcgggttccggattattcccttcatccagcttgactgggcgggaaacacccgttccgaaatccgccgctacgccggcatgaacgcgattgaggacttccgcatccgcgtgggcgtggaagccgtttaccgtttttaagcggatgctccgcggccctttcaccgggaagggccgcggaagcgttccccctttccgggggcgcatgccccctccccgccttcccttgaatcccctgccatgttgaaaatgatttttctgctggcccggcgcatgtttatacggctgctgctggtgttgcttccgctgggcctgtttatgttcctggcgcaggccattcccctttcccctctgcaatccctgctggtgctggttccggtgattgcctttgaagtgtggctcgtcatcaggcatctgctgcccgtcatgggggagctggtgaccaagacgctgtattcctccaatattactacggatgaggaagtgctggtggaggcttccaggcgcatgctgaattccggggatccccagggcgctctggaattgctggaacgctaccggaaggagaatccggggctggtgcgttcctggcttatggaatccagcctgctgaacgatatgcgccggtacgcggattccgtcaacgtccttcagaaaggcatggaatacggaggatggcgcaaggaggaccgggctctgttcctgtacaagataggggccatttacgattcccagctccatgacccggacagggcccggaagtattgggaggaagctgcggataaatatcccgatacggcctatggccgttccgcacgggacaaggttatgttttaacgctgttttccatgaagagaagatgtccggaaattttccccccgttgttttaaagagccgtgcatgacggtggactaaaatttcctctttttcattattctgagcgggggaatatttttcaagactgttgccgggatgccacggtggttcttccatctgagaacggagtaattaaatattgtatagatcaatgtgtgtgttaccatttttccgcatttaataataatgctttgccgtttccttggaaccggattaatttttcaactaacatgatatgagtaaaataagccatataaaatatatggtgctttgcaatcttccctaccgtttgcgggaaatcgccggacgaatggcgaagaaatgcaggagaaggaaagaccggtctcttgaagcgaagctggaggatattcgcaatttgctgatttataatcaccccatttcctcggttcctccggcgacggggaagttgaggctccttcaggacggcaatacggttttgctggccctttttgcgcgcagatgtcgggaaaacgggctgcggtactggctggattacggcacgctgctgggggcggtaaggcacagggggtttattccgtgggatgatgatctggatgtgagcatgatgaggccggagttcgaccgcctgctggaactgcttcccgttcttttcccccgtgaggaaggatttacctggaacaggcacgcctttctgcaactaggatatgaaggcacccccctcaaccttgatgtgtatccctatcatttttatgcagagagtctttcatctccggaacagcatgggaagctggacaggcttatgagcggatttaaaaaagacgtggtgctggtaggttccgagatgaacatgaccgatgagcaggttcaggagaaaatccgccgggatattctggaaggaagggaagccgccggggaagaagaagcccccgggatttttctttctcccgccattacgtttacaaaaaacacgcacctttcctatgaaacgttcttccctcttggctccgcagaatttgaggggatgatgttttccgtgcccaaccatgcccgccagtacctgcaatttttttacggcgactatctgtcttatccggaacgcatccagttcaagcatccttccgtgaaggccatggtggagaaggttccctttgaggcggcggtcaaccgtttcattgacgtttacggaaaaaggattgatgcgcccatgccatgaaaacggttattacttacggaacctttgatttgctgcacacggggcacgtgaacctgctgaggagggcccggaaactgggggaccggctcatcgtcggcgtgactacggacagttacgaccagagccgcggcaaactgaatgtcatggagagtctggaggaacgcatggaaaatgtgcggaaaaccggtctggcggatctcattattaaggaagaactggaagggcagaaaattcatgacatacggaagtacggagcggatgtttttgtgattggctccgactggtcggggaaatttgactatcttcgcgagtattgtgaggtggtttacctggaacgcaccaagggcgtttcttcaacagacctccgttccgcccggaatcccattgtatatatgggaattgcaggtcatgggcgcatagcgggccgttttctccgggagtccaaatatgtcagcaatatagaaataacagccgttttcggaaggaataaggagaaagtccgccgttttgcagagtctcacgctctgctggaatattatacggaatatgagcagtttttggaccgggttcatgccgtttatattgccgtcccccatcatctccattatgaaatggccaggaaggccctgttgagggggaagcacgtattgtgcgagaagcctcttgcccttgcccggaaggaggcggaagagctgttccggctggccgaggagaaaggagtcgttttgctggaagcccttaaaactgcgttttgtccggctttccagcaattgaccagtttggcggggagcggcattattggttccatcaaggcagtagacgccacatttaccaagctgatagaggatgaggctgccagggagtatgaccccatgcaggccggaggcgcctggacggaactgggttcctatcccgcctttgtcattgggaagcttctgggaaccgatccccgcaggattcgttttgttacttgcagaaagtctcatacgggcgtggatgtgttcacgcgcgcggaatttctttattccaatgcagtagccaccgctacggcagccataggagccaagcaggaaggggacttgtgcattaccggaacggaggggtatatttatgtgccggcgccgtggtggaagacggagatgtttgaagtgcggtttgaggatacccggctcaacaggaaatattttgccaattttgaaggggatgggctgcgttatgaacttggcgcgtttttgcgcctgattcatggctgccagcacggcaaccgtcttttgacccgtgaggattccatgttcatggctgatgttgcctcccgttttaggcgtggggaaggagttgatgaaatcagctgatcaggacaggcatgccgtttgccggaaatgaaaggagggagatttttccttctgctcctcaacattaatcaggcggtcgtaaatgtgcctggcgaagacgatatcgtggaggcccagccctatattgtagctgaggatgcgttcttccggagacgttcttcccgctgtttttccggccagcaccggagctatttccccaaattgacggaagcgctcaaaatgccggaaattcttaacatggtcacgatcatcggcaaataccttgtcgaaaaacaaatcacaattttggaacccctttgtatgtacggggataacagtaatgcctggtttgaaacagctgtcttcggcaaggataccctccgcattagtaatgcaggaaatgacggcatctgttccatcaatgaggccattgatgtttttcacttcttcaaaacggacattgctgtggcattggaattcttcaatgaattggggaacatgcgttttgtaggaaagaagacgcaccgtgaagtttttttcaggatataacgccagaatgcatgccatagtggcgcgggccgtatttcccagccccatcagggaaattgtctggaaatcctgtctggcgaatgtttgaagggcgagggcggctactgctccggtacgggcgttcgtgacccaaaaagcgtccataagagccagaagctctccggtatgataatcgtaaagtagtatttccccattaatggttttggcccgttccgggtaacgcgttacaatttttacccccatggcgttcaagccggggacgatgcagggcatcgtattcatgaattttccttcttcaaaggcgatgcttgttttatggggaaggaatacaggttcttcctccttgatatggaaggactcttttacccattggattgcctgccggggagaaatattgagggaggaaataatttcgtgaggaattgtcagcatggtaggggggggtagagtaaaaacggcgtttggaaaaagagagttaatgactagtttgaatgcatggaacagagctcgtgcatggcccggaccagagcatcgttgtcggttgcgtctctgacggcgatacggatgaattccctgccttcaaatccttttttccggctgcaatccttaacaaggatggagtggtttttcagcagaaggccggtcagggagcgggctttcatggggggcttgacctcgcacatgaaatagtttgcctgggaggggaaaacgttcaggaaaggcacgcgggagagttcctgcatgaagcggtcccgttccttcatgaaacggttgcacgcgcgcacgtaggattgctcgtatttcccgaagatttgcatgtagaattccgcgatggaattgatgttccagatggaaacatctttttttatccatgccgccagttccctgtctgcggaggccagaatacccaggcggaggcccggaacgccgtaggatttggaaatgctttttaccacggccaggtggggatattcttccagaatgccgtctttcagcagcgtattgtccggcattccgcaggagaagtctacaaaggattcatccacgatcaggcggatgccgcgggtttttgtccacaggcagaggcgcagcacatcgcctttcggcaggaagaatccggaagggtttcccggattgacgaggagcagggtaccgatgtctttcccggaaaagaattccatcaggtcgtccgccgtataagtgaaattccgggaagcggtatggaagggaaccaccatatccggtttcacccggttggggtattcttcaaaggtagggtagatgacccccattttcccttccaggcgggacatgagcgccttaatgagttccgccgcgccgttgccgatgcagatgtattcctggctgatgccgaagtattttgccgccagcaggctgttgactctcattccggacgggtattccctcaccaggcgttcaaaattcgccttgagttcggacatgaggcgtttgttggggaaatagggattgaccaggtaacagaaatccctgatgcggggatagcgccagtagcctccgtaccgggattccatcaggcgcaggtgttcttccctgtccggggtgaatatggaggctgcgatgtccaggtcctggatgtcgtctatttcataccatgcttcgcctccgaggcgcagcgccttgatttccggcttgtccagcagggcgatgacccgcagcacctgttcgtaatattcattattgcccagggctttgctgtaggctgtaagaaaggggacgtaatgggtccgggagaattccctgctgaatttgtaaatattgactgttttaaaatattccgtctttttcttgtaggagaatttgctgccgggaatgaattgcctgatgttgtcgtcttcatccagagtgacgaccgtgccgtccatccagctttcaaatttggcgacgagagcaaggctgggatagggatggcggagcagggcatcaataacggagtcttcaaaaatcaggtcggattcaaagagcagcgtgtcgtcctgaagcaggtgttccttggccaggtacagggaataaatattgttggtgctggcgtacaggggattgtccacatattccacaggggtggaaatgtccagccgggaaaggaaggttttgagtttttccccctcataacccgtaacaatcacgattttttccagagacggggaaaggcggtccaattgtctcatcatgcgttctatcagcgtcactccgttgacctgaatcatgcacttggtattgttccgggtgagcgctcccagtctttttcccattccggccgctaaaatgatcgcctgcataagtattctaatttgtcttcagaacctgagaaagaaccgggaactatgtttaacggattgagcatccgccgtcaaagtaaaaatttctgtaagaatatgttaatgggatattacccgggcgaaaagaaaaaaccgtcttttatgtttcatcgcaatccttttatttttcattgatttaactttggacagaatgggagaaacgtttaacggatgctcaatccgtttgttgccaataccgtggaaagggaaggataaggtctgtctgcattttggaaaaagcagcgttaatatcatggaacgggtgttttctccgaaaaggacaacttgtttttcattgacttgtaaaaagtgagggataaggttttgattctgccggatgtgctttcctggaaaaatgaagcatatcccgcatgttgttgaccaaatttacctgtgatgaagctgccatcattcattaccgccggaaggactggaaaattagtaaggggaaagcattggtgggtgacggaagtccggtgctgcggcctgaaagtgctttcttcctgcacggataggaaaaagcgtttcatccgttttttcggtattccgtgcggacggttcaaggtgggccgggaaggtgaagcctcccaattgggcaaactggtaaaatctaccgttcgggccgaggaaatgccccaggcgtccggagtgctgaggattgtgcagcaggccatgacctgttttttgaatgaagtggccgggattcttgaggagggcggttatccgtactggctggatttcgggacgctgctgggcgcggtgcggcaccggggctttatcccctgggatgacgacctggatatttccatgctgcgtgaagattatgaaaggttgagggcgaatgccgccgggcttttcggttcgcgcggtttctccgtcagtatggatccgttcatccagatagggttgccgggcacgttgtgcaatgtggacattttcccgtatgacacggctcctgccgcgtggtctccggatgcgcctgaggaaagggagtggctgctgcgcggttacaaggcatccggaatgcttgattatgaggcagattcctcctgccgttaccggacgcggtgttcctatgaggaaaagatggcgatccgggaccgggtggtgatgggaggacggcggccggcggatggaggaaacattttcctgggatttgagattccttttgccggcccgtgccgccattccttccgccatgaatggctgtttccgctttcccgcgtccggtttgagggaagggattttccggcccccaggattcctgaaatggtgttgtacggccagtacggggactggggagtgctgccggattctccccctgtgcattttgatttgaaccacatttccaaggaggttctggctaggatgatgtacatgcgtgatacggggcgccttcccgggcgcgattaaagggccgcacccttttcttcccccgcagggagaagcccttctttcttccttgaccctgctgattgaggaggggtatcattagataatgagaagacccccgatacccggcttggtgatggcggacggatggctccagccgtattcccgccagatacgcgaccgccagcgtctgtttgacctgaaaatgaagaggatcaatcagcgcgccggctctctggaggaatacgcgcgcggataccgctattacggtttcaacagagacgcggagacgagggcgtggacataccgggaatgggctcccgccgcccgcagggtgtccctgattggggattttaacggctggaaccgggagagccacccgctggagcggaatgagcgcggcgtgtgggaaattacgctgccgcctgatgcgctggcccacgggcagaaggtgaaggtgcacgtggtcggtgcggacggcacgggcagagatcgcattcccgcatggattaccaggaccgtccaggatccgaccacttatgattttgccggggagatctggatgccggaacacccctatgaatggcggaataacggttttgatccctcccgggtggaagttccgttcgtgtatgaagcgcatgtaggcatgggcggggaagaagggcgcgtgcatacgtaccgcgagtttgcggacgaggttctcccccggatcgccaggctgggttacaataccgtccagctgatggcgatccaggagcacccctattacggttccttcggctaccacgtttcttcctttttcgccccttcctcccgtttcggcgagccggaggacctgaagtacctgatagaccaggcgcacggcctgggcatcgccgtgctgctggacgtggtgcattcccacgccgtgaagaacgaggcggaagggctgaacaattttgacggttccggaggcatgtatttcctgcccggggagcgcggccgccatccggactgggattcctgttgttttgattatggccgggacgaggtgattgaattcctcctgtccaatgtccgctggtggctggaagagttccgttttgacggcttccgttttgacggcgtgacatccatgctgtatttccaccgcgggcatgagccgttcggggatttgggcgcctacttcggctcttccgtggatctggatgccgtggcttatctgcagctggccgccacgctgattcagcgggtgaagccgggcgccatagcgattgcggaggacatgtccggcatgccgggattgtgccgcccggtggacgaaggggggattggtttttcccaccgtctggccatgggcattcccgattactggattaagctgctcaaggagaaaaaggatgaggaatggagcatgggcgatatgtggcacacgctgaccaacaggcgctacggcgagccgcatgtggcctattgcgagagccatgaccaggccctggtgggggacaagactctggcgttccgcctgatggatgcggaaatgtactggaaaatggccgtggaccagcagagcctcattattgaccgcggcatggcgctgcacaagatgatccgcctggtgacgctggctaccggaggggaaggctggctgaatttcatgggcaacgaattcgggcatccggaatggattgattttccgcgcgaaggcaacggctggtcttacgaatactgccgccgccagtggtccctggtggacaatccttccctcaggttcaagttcctgaatgcctttgaccaggcgatggtccgcctggcgcaggaagcccggctgctgaataatccgccgcctttcccgcttaatattgacgagaccaaccatgtcatggcattccaccgcggcggtctggtatttgtgttcaactggtccggagacagggctatcatggattacatgctgcctgttccccagaagggggaatggcgggtcgtgctggatacggacaacgcccgtttcggcggtttcgggaggcaggatgtttccatgccgcattttacggatggggacgggaacctttccctgtacctgctgccgcgtacggccctggtcctgaaaagggtaggttccgccgtcatggcccgccgcctggggcgggaggattagcgtgcggcctcaaaaaaactggcgggtttattggatccgtccatgaaagaggcgtgcggtacgggcctgcgtaccgggcgcgggatgaataggcgctttccctgccggaacgtgtccggcaggctgttaccactgcgcgggaagttcccgcaaggggggcgctcctgaatccgcctttttcaggcggatggtcaggatgtccgttttgaagtccttggacttctcgttattgcggccccacaaaatggctccttgcgtggtcatttccggataaaacgttttttccgtggaaaggaagcccggtttatccgccgcaacgtgcacgggcttgtgcctgttcagggagagcgtgacgggggcctggccggcgtagtctccgttcacgcgcaggctggctccggaaggaatgctgcggatggtgatgtcccgggaagggctgctgcatgagaggcttgcgccgcagaatgcggagagcaggagaagatgcgggaaaaggccgtgagtcattgctctggaaaaaatcaatggtgttccgccatttttatggcggcctgcttgatctgggccgccatggagttgagggcgttcgccctggtgggcgccaagtggtctttcaggccggttttgtccagcttggacatgtccgccttcaggatttcttccggaggcaggccggaaagcagccggatgaagacggcaatgaggcccttggtgatgagggaatcgctgtctgcgtacaatttcagtacgccattgtccggttccgtgtgcagccatacgcgggattggcatcccttgatgagggagtcctccgttttgtaggcttcatccagcctgggcaattttttacccaggctgatgatgtattcgtagcgttccgtccagtcctggaacaaatccagttcatccagcaggtcttgcaggcgttcttcgtagttcatggctcggagattgggtaggatgagccgggcgggttatccccggcgggcgtctgcaagcgtggcgagcacggctttctgggcatgcaccctgttttccgcttcccggaagataacgggagcaaaatgttccagcacgtcttccgtgatttccttgccgcggtaggcgggcaggcagtggaaaacggagtggccggaggcggcatgttccagcagctccctgttcacctggtagggatagaagtgtttttccttggacagtccttccgattcctggcccatggaaagccagacgtccgtgttgatgacggaagctcccttgacagtttccacgggatccgtggtgaagatgacgttctcgcagtccagatgcctgcggaagtcttccaggggaaggtaattggtaggggctccgatggcgagcgtaaagcccagcctcttggccgcccacatccaggagcgggacatgttgttgtccccgtcccccacgaaggcgattttcatatccttccaggaaccggggccgtagatttcctcaatggtaagcaggtccgccaggatctggcaggggtgctcctcgtccgtcagggcattgatggtgggaatgccggaaaagctggcgaattcctccacctcctgctgtccgtaagtccggatggcggcgccgtgaatcatacgtcccagcacgcgggccgtatccttgatgggctctccacgcccgagctggatgtcttggacggaaaggaacatgggacgcccccccagttcactaatgcccacttcaaaggaaacgcgggtgcgggtggaggatttggaaaagatgagcgcccaggtctgccccttcaggggaaggcgttcgtgatggccgcgttccgccttaagccggtggcccagggcgagcaggtcccggatttcgtctccggtaagctgttcgatggaaaggaggttgttcatggtttttgaaagggaataaaaacgggaaagccgcaccatactccctgttttcttaaaagaaaagggaataatgcggctttccagggagggatggagatgcctttacagcctggctgccgcttggtccggccacggtacgggagcgccttcacgggctccggcgggattattctttttgtaggtgggcatttgggccttgcgctccttgagcagggcggtcatggtcctggccatggccttaacgcgttccggctgctgttccgccaggttgtgctcctcgctgatgtcctccttgaggttgaagagttcgaacttctggtcagggtgccagtagataagcttccagtccccctggcgcatggccgtgctgggggaataacgggagttgtttccgttcccttccccccatacgttgggcgtgtggaagagcagggggcggttgggattcatgctgccgcctttcagcagggcaacaaagcttttgccgtccacaacctgaggcgcctgaattttttttgctcccgctatttccagaatggtggggaaaaagtcttcaatgatgacgggagtggcgcagacgctttccgcctttgtgaccccgggccagtagacgatcatcggttcccggatgccgccttcccggttggaacccttaccgaaactaagcgggtaattggattccttgttgcccatgcgtccgctgatggcaaggcccccgttgtctgccatgaagatgatgacggtatttttatccagattgttttttttcaggtattcccggatgtcgcccaggctcttgtccatcccctggatcagggcggaatagcgtttttcgttgtcggaccatttatggccgtcattggggttggagtactcttccgcaaatctcttgtcatagccgcgcatgtcgaagggggcatggatggcgtaatgggacatgtacaggtagaaaggcttgtccgcctccctggggtttttccgaatggcgtccaggcgtttcagcgcctcttgcgtcagggcttccgtcaggaatgtgtcgttttcatagtaattattttcgtccagtccgcggacatggaaattccccgtgccgtatttccgggaaccccggtagtccgccgggccgcctatttccgtgccggcgatattgtagtcaaagccgaagagcctgggattggctccgggcgtatttttggagccgaaatgggcttttccgcagtggatggtggtataaccctgttttttgagcagggcgggcagcccaagcacctgggtgaagggtttttccatcctgtactggattttttcttccgtcaggggaagatgggtggttccggacgctctggttcctgtcggctggatgccgttgacgctccagtctgcgggagccttgagcgcttgatggcctgcgtccgtggtttggtcacgcaggagcgtccagttcgtgacgcggtggcgggcggagttcatgccggacatgaggctgcaccggctgggggaacagataggctgcgcgtaggcattcgtgaataccatgccctgtttgcccagagcctccatgttgggcgtgcggtagcgcttgttcaggaaagtaggtttgggagtgccgtcctcttcccgccaaaagggcagggatgtatcctgccagcccatgtcgtccaccagaaagaggatgatgttggggcgtttcggttctgccgcgcgggatgcttttacggaagctgcggaagcggagcaggcgcttcccagcaggaacgggatgagaaaggctgcgatgcgggaaatgttcattactaaaaatgaccggtacttataataacgcatgagacggacgtttctgtcaaggattcgtattcccgcggcagtttgttcggagacgtcctgttttgccggtgcggcgtgtaccgggatggaagagccttattcaaacagggccgggtaggatttccgggccagggccgtgctcaagtccacgatagccctgctgttgggggcctggagcgccttttgggccatgtcccggcactggccgtagtccagattgcggatggcataccggatgatggggacaaggtggacgcccacggacatggaggtggcccccaggccgatcagcaggggaagcagggtaatgtcccccgccatttccccacagatggccgtgggaatgttttcccgttctccggcggtgatcgtcatgtccatgatgcgtatcacggcaggatgcgtggggcggaacatgttggcgacgcggttgttgacccggtccacggcaatagtgtactgggtgaggtcattcgtgcctatggagaagaaatccacctcgcgcgccagcacgtccgtcatgatggcggcgctgggcacttcaatcatgatgcccactttcaagtcccgcgcataggggatgttcttcctttccagttcttcccggcattcctggaggatgtgcttggctgtgaccacttccgtatagccggagaccatggggaacatgatgccgcagccgggcgtgtccgcgcaggcacgtagaatggcccgaagctgctgcttgaacagctccgggcggctgagggagacgcggatgcctcgccagccaaggaaggggttcggttccggagtgcggagctgttcgcacggcagcttgtcgccgccggagtccagggtgcggaagatgacgccgtggggggagcaaccttccgccagctttctgtagtagcgcgtttgttcttcttcatccggcatgccggatgggttgctcagcagaaagaattccgtgcggaacaggcctaccccttccgctcccacctccttgatgccggaatattcatgggggaactccacgttgacggacaggcggatgttgcgtccgtccctggtgatggtgggcaggtcgcgcagcgcttccagcgccttgtaggccttttccttttccacttggaggcggtggtagtattcctccgtttctttcgtgggtttcaggatgagcacgcccttgtagccgtccagaatggcgggtgagtggctttccactctcagaagggcctggtcaagccccacgacggcggggatgcccatggagcgggcgagaatggctgtgtgggaaacggaagagcctatttccgtggcaaagccgtgaatcaggctggcatccatggcggccgtgtcggaaggagtcaggtcgtaggccaccagaacctggtctttttccgtttcttcctcgtcttcaggaggttctgtgctgcggaggttgttgatgacccgctgcatgacatcctccatgtccgccgttttggcgcgcaggtaggggtcgtccacacggcgcagaacttccatgtagttctgcatgaccacataaaagatgtgctccacgttctggaggcgcttgagcagttccgtctgaacctgctggaggataattttgtcctgaaggagaaggatgtgggcgtcgaagatggaggcatctttctctccggatatctggatcatgcgttcccgcagcgtcctgatctggtccgcagtggtttgcagcgcccggtggaagcgcaccagctcagaatccacttcttccggggaaatatcgtacgctacgggttccttggaaccgctgatttgaattttaattttgcccagggcaatgccgggggaaacgggaatgccctgaagccaggtttcttccgttgaaatgggttcctgaatcatctgcgggcttaatggcccggtctcatatggccgtgagccggagtgttcaatcttcttcaaacttgcgggaaatcaggtcttccagcgcattcagcgcttcctgttcgtccttcccttccgccgtgatggtgatcttggagccgtggcctaccgccagcatcatcaaacccagaatgctcttgccgtcaacttcctcgccatccttctccacgacaatgtctgcatcaaatttgctggccagtttgacgaattgagcagccgggcgtgcgtgaatgccgagtttattgatgatggtgagttccttggtgaccatggaatttgaagtaaggggtgataacggttgctacaacggtaagtacactaattaaagtttttttccaagagttttttgtcagtcctagttttcggaggattggaagtttgacatgaggcggcggttgaactccccggccatgtcgatgcccatgtccttaagatgatagtccatggcggctacttccaccagcctggcaatatccctgccgggagccacggaaagctgaacatggagcactttttcccccaggacgtccagcccctccctctccagaccaagtctgtccagctcttcctggtccttggcgggaatgagggtgacgatgagatccagacgcttgttgtggcggatggatttcaggccgaaaagggtggtgatgttgacgatgcccaggccgcgcacttccataaagccgcggctcatttccggggcgctggccaccagttctccgcccacgttgcgtacatacaccatgtcgtccgctacgagggccgcgccgcgttcaatcaggcccagggccgtttcactcttccccacgccgctcttgccgcggatgaggacgcccactccgcgcacgtccaccatgcagccgtgcagggtgacgctttccgcgaattcgttttccagaatgatggtggcggagttgacgaatttcatggtcaccaggctcgtgcggaagacgcagacgccggcttcatccgccagctccacgatttcccggggtggattctggtcacgggagaagacgatgcccggcacctcgcaccggaacatgcgctgaatgcgcgatttgcgcatgccttccggcagtttttgaagataggccagctccgcggagccgaaaacctggatacgtttgttggcaaagtaggagtagaagccggcgatcgccagcccggggcggttgagggcgggttcgcagatatggcggctgaggccggcggggctgttgatgagttccagttgaagggcttccttgtacttgccgtaaaatttggacagggtgacgaaatccactttcttcactttggatttgctgaacataatcctatataaagaaacaaaacacacgcgagagcaatcaaatattgttcccggcgccatgtgcgggctccattttttgaaaaaaggcccgctccggcatggaatgccacactttaccggttgatttgaagccccagacatggtctgatgaaggcatgaacagactggatcaattagccaccttgttgagatttccaagcatttccgcacagaaggaacacgcccgggacgtgagtgattgcgctgactggctggtagacaaattgtccggcatgggattggaagccaaggcctgtaaaacgcccctccatcccattgtgctggcccgcagcccgcgggaggaaggaaagcctaccgtgctgatttacggccattacgacgtgcagcccgtagatcctgtggaattatgggaatccgacccgtttgaaccggaagtgaggggcgggaagatttacgcccgcggcgctacggacaacaaggggcagctgttcgcccatattctgggcgtggaggaattgctccgccagaacggaggccaccttcccgtaaatgtgattttccttctggaaggggaggaagaagtgggcagcggcagtctttcccagtttatcaaggagcacagggaagagctggcctgcgacgttattgtggtttccgataccggcatggccgctccggacacccctacgttttcctacgggctgcgcggcctggccggggcggaaattatcgtcaaaggcccttccgcggatcttcattccggcgtgttcggaggagcggtggccaatcccatcgccgctcttgcggaaataatcgcctccttccatgatgaagaggggcgtgtggccgtgagagggttttacgacggcgtggaacctatcgccacatgggaacgcagtatgtgggccacggtgcccggcatgagcaatgaggaactggctcagctgacgggcgtggaaaccgtggtgacggaggccggtttcaccggagcggaatgtatttttgcccgcccgacgctggaaatcaacggtatcggaggaggttaccagggtgagggaagcaagacgattatccccagccatgcctttgccaaaatttcatgccgcctggtgccgggacagcagcctgaaaggattgaaaccctgctggaagaacatgtaaagaaacattcccccaagggcgtcacggtggaattcaggcggggccatggcgggaatgcttacgtgtgcgatccgaattccgagttcggtcttgccgcccagcaggcgctggaagaggcttttggccacaaacccgtgctggtaagggaaggaggcagcatcccgatcattgaggaaatgaagcgcgtgctgggagcggatgccctgatgctgggcatgtgccttccggatgcccgcatccattcccccaatgaaaactttcccgtggatttgttctccaagggcattgacatgagccagattcttctgcgccgcctggggcagatcaagcattgaccttttttatggaccagcctgtagccgctgaaatagtcaacctgcacaagacctttaaaacaggtcttggcaaacccgtggtgcatgccgtgcgggggatagacatgaatatccggcaaggggaggtatatggcctcattggcccgaacggctccggcaagtccaccctgatgaaggccctgctggggctggtgaggcctacggaaggttcctgttccattttcggcaggtccagcctggctccggacagcaaggaggaagtgggctttcttccggaaaacccctacttttacaaattcctgacgggggcggaaactgtttccttttacggcaggctgtgcggcctgagcggaaaatccctgaaagcgaaagtcagggagctgctggagctggtgggattggctgatgcggcggacaggcggctgggcggctattccaaggggatgctccagcgcatcggcatggcgcaggccctggttcagtccccccgcctgctggttctggacgaaccgaccgccggcgtggatcctctggggtcgagggatatccggaacattatcgaaaacctgaaagggcgtgggatgaccgtattcctgtgttcccacctgctggaacaggtgcaggaggtttgcgaccgggtgggcgtcatttttaaagggctgctcattgcggaagggtctgtgaatgagctgacgcgggattccgacaagcaggaaatacttctggagcatgcttccccggaattgatggaacggctgaagaatatggtgaaggaagacggccgtgccgtttggctggaggatgggcatccgcgcaactccctggaaagcgtatttctaaaaagtttgttggaatggaaggaaaagcatcccaatccggaatcgtaagcggtccggcggctgccaaacgggaagtgcgccgcatgatacgtgaaagggtgggcggattggatgccgccgtccgggaggccatgtcccgttccatctgccgccgtgtgtcgtctctggtgcgggagaagaatttccggcgcgtggctgtttttgccgccaggccgggagaggtggatttgctttccctgctggatttgcttccggaccgggaatggtacttcccgctggtgcatgaggggagaaggctgagttttcaccgtgtatgccatcacggggaattggtggcgggcagctggggcatacgcgaacccggtccgggatgcccggaactgcatgcgggggaaatggatttgatagtgctgcctggggccgcatttaccagggacggcaagcggctggggtatggcggcggattttatgatacgctgctggccggcccggctgctggggtgccgttggcgggagtctgcttcccctgccagcttctggacgatctgcccatggaagcccatgacaggcatgtggacatggtgattgcgccagaaggggagtgacctctccggagaaagggaaagaggctagatacggaaccggtgtttctgcacggtcagtttataaaacaggtcgtagcgggcgttgagcaggggctggaggtattccacccctccggctacctggccgcggatgtccgcatacagtttccggtagtcggaaagtccgctgatcatggcttcatacaggggggtgcgcaacccgcattccacggcaatgtgcatttccgccgctgcggccacaatctggcgggacaggcggaactgcatccaggccagccccaggttgccgcccacccagacggccagggccgcgcccacgcaggcgaaccctgctgcgtgctctccgaaacagcccagcagggctcccagaatcaccagaaggagcatcagcttgatttccgtcctcatcacatcctcctggtccagaaacagcttgctgaggcacggcttgatgccgaagtccttcaggggcatgtaaatggaacgccccagcctctctttgtacacttccagatccgtctggagctttgcggccggaaagtcccctatgtcgcagtcccactgttccttcacgcgtgggcgcacatggttccagtgcgtctggcagatgttcaggaattccttgttgtaatacgcgtgccgttcctcaatgccggatttgaccagctcataaaaccattcgtcaatgacgggaggaagcttgtgcaggatcatcgtgcgccggatggataggaaacgccccatctggcgtgccgactttttccccagacgcggcacgcagtcctgcacgtattgcgcgtatgccttgaggcgtgccggcatttcatcctccatctggagctggatgcggtcgatttcccggtcaatggacgtcaggaagccggaatccatcttggaaaggcggctcagttcatcaagcaccttcccctgttcttccagaaggctgtccgtagccagcagaaggcgttccacgcgcttgtccgtcagcgggctgcgtttcagcacttcctgaacgcacgccgtcagggcttccactccttctcctgcatgctctccggcggtcgtgacagggtacaggggcagctgcacgcccaggcgttcccgggaggtggagcgaagctcctctttcaaggattgaagcctctcaaaagagagcagctccgcatgggtgatgacaagaaccatgcgggaatggagacgttcctccagcgtctggagatagtcccacaggacggaatggttgccgtcactggcggaaataaccacaaggatggcatccgatttgggaacgatgtgcttcagctttctgggggcatcctcctgttccaggccgatggtatcccagaactccaggttgagcagggcgtccgacgggtaaaaaaggtccagaacccattcatgggtgtgtggggcgggatgaggcctgtactgccagcggaccagtgtggcttcactggacacgcgggaacagaaccgttccccggccagggcgtccagcgtagaggatttgccggaccctgtcatgccgatgacggtgacattctgcggagagcagcattcggccagggcttcctccaccttttcctgggaatcgaaatgacggtcggggccaatccgggcggaaaacgccgcagcggcatccgctacgtcccgcaccgcatgcggaatcacgttttttcctcctgtcagcatggggtgatgaaatcaggtctccgtccgggctgttccggttttccggaacaaacctacacgccgcttttccttctgtccaactaaaatcacgaagcgggagcgtacgagcggccgccgaaaatggccgtccctacgcggacgagcgtggctccttcctctattgccgtttcaaagtcgtggctcatgcccatggacagttccgtcagcgtggctcccccgctgccggacaggacttccttcagctcccggagacggcggaaatagggccgcgcctcctccggattttccaccggggggggaatgcacataaggccggcgatttcaagatggttcagggaggacagctccggccattccttttccagggtttccgggaagaatccgaacttgctgtcttcattgcctacgttcacttccagcaaaatgcggggccgttttcccgtttcctgagccacggtatccatgaaccgggccaggcgcagggagtccacggcatggatcagcgtgaaatattccagggccttgcgcaccttgttgcgctggagggggccaatgagatgccattccgtatccggaggaagggaagggatttttgccagtccctcctggaccttgttttcaccgaaaatgcgctggcccgcatcatggcacgctttcacatcctctgcgggaaaagttttgctgacggcgacgaggcggacggaacccgccggacgtccggcgcggagttccgctgcgcgtatgcgggagagaatatgttccagattttgttggatgctcatgatggatggttcagttcagggatggctgtgcggacgcgtggctcatgatatggtgcaggggagagagccgccgcatggccatggcccagaccttggaagaatccgtttccaggcagatgtccggcaccatgggggaaacataccaggcacggtcattcagttcccggcgcagctggggcggcgtccacccgctatggcctacgtaggcgcgcaggatggcgcggggatcttccaggtattccagggcctgttcctcttgcagatgaaactggacgcgcaatttatcctccgtgcggatgaaagcggcgaagatgagctggttgcgttctacgggccctcccttgaagatgggcacggcgtaaagggattccggtatttccgtatggcgggctacgtcccccacattcatgccggacggatgattcaaaatatggccgatgacaaattccttctccgcccggctcaggaagatgacggaatgatggaatccggcgccatccaggtagggggcggcgaccagaaggtgccccgccaggttttcattgctgatatcttcgtgttccatcatggccataaatctacgttaccaaatgtgacggatgcaggcaaccatgcgttcaaacggccatgtcaggaggcggcgaaaacggaacaccggaaaaacaggagggaagaggagcttttacccgagtgtatagcgggtccctccggaggaacggacggcggttctggaatttccgaacgtcctgcgggcgaccgccctcctggcgggaacggatttcttcccggttgaggccgtttgcttgcgggaaagggcaacggcgggggggcgggaagccctgcggcggtgggaaatgacggaggccgtattggcgttctccatgcggtctggagcggaagccatgaccagcagggaagaatcctgcattttttccgcctgggccagggctttcagggaggcgtcaatggaacagcgttcgattacgaccgggtctccggtacggagcaggttgaaggcctcatatacgtcattgctcttcatccggacgcagccgtaggaggcgggggtgccgatggtgcgttcctccgccgtaccgtggatataaatcaggcgcgagtgagcgttccggttacggggttccagaccttccagccacatgatgcgcgtgacgatggggtcccggcccggagaattgggcgcgacgcattccccggtgggcttgcggcttttaaacaccatgcccttgggctgtccgctgccgattttggaagcgatgcgatgggcgcccagcggagtgcggcagcttccctttctgtctcccaggccgaatttggaagtgctgacagggtaggttttcaccacccggccattgcgcatgacggccattttctggtccctgacgctgacgaccgcgccgtctttcacgatggcggtgggctcataatccggacgggaacaggatgccaggactccgaacacagcgaaagctgcgccggcgagttgaatcaggcgtgctgcttgcgagagaggcgcaggcatgggaaaggcgtcagttcttggctttggcagtttgcttggcgggcaacaggttggaaatcatgcggcccagggaacagaatcctgtgtaatagaaacccaggaaaggaatcatcaggatgggggaaaggtaatggccctggcggatcatgatgatgatcaggttcaggaagaaagttccgcaggcgatttccagaacaggaatgacgacggatttaatagcccggtacccgttgcgtttgagctgggagacgtgccggcggtcttccttccggtccacgccgtatttgggcgtgcggacgaaggcggactgatggccgaagatggcttccagaacagccttggcgttgttgaccgccatgcccacgctcagtgtgagaaggagggggaggtacggcagttccttccaccaggatttgggacgcaccacgatttgggcactcatgtaaaagatgcagacggccacgctggtcatgaaaaacagggccacattcacaaaccacatgaagaccgtttcattttccggaatgcgctgcgtgcagatggggtacaccaggaagcagagcagtgccaggagcaggtaggaataattgcaggtgaggtgggtggtggcttctaccttggctttaaggggagcattggagcgccagatgtccagcaggattttctggcagacctgaatggaacctttggtccaccggtgctgctgggacttgaacccgtccatgtccacgggaagttccgccggggtaacgacgtcgttcaggtagatgaagcgccagcccttgagctggacacggtaggaaaggtccatgtcttccgtcagggtgtcatgggaccagccgcccgcgtcgccgattacgcatttgcgccatatgcccgcagtgccgttgaaggtgaagaatcggccggaacggttgcgggccgtctgttccatggcaaaatggccgtctaggtacatcccctggatgcgggtgaggagattgtattcacggttgatgtggccccagcgggtttgaacgaggcccacgttttcatccgtgaagaaatggatggttttttgcaggagatccggttccggaacgaagtctgcgtccagaatcagcaggaattcccccttcgctgttttggtggccgcttccagcgcgcctgccttgaagccggtgcggtccgtgcggtggatgcagacggcgtcaaagccgcgggactttaattcctccaccttgcggcagcattgttccgtggtgtcgtctgtggaatcgtccagaatctggatttccagcctgtcctgcggataatccagagcggctacggattccaggaggcggtccacgacgaacttctcattgaacatggggagctggaccgtcacgacgggcagttcctggaagcgcgctttgggctggggcttgttattgcggtttttccagtacaggtaaacgatgctcaggcggtggaagccataccccgccaggccgacgaggaccagaagatagcacaaaagccagataaaattgtaatttaaagacatgcagggggcacaaaggtggttggtatctttttgcgtcagggcagggggatttccttgacgtgacgcccgtataggacaccatagggcgagagtcaagacatattccgttttgcttaaccttttcgagtgttgttatgaagagattgtatctgctggccgcagctgtatccgtcacggggggaatggcgttttccgctccaaaagaagaggccccggagaaggaggcggcagtactggatgcgcaaacgccgccgtccggcaagcaggaccagccgaccgttccggaacgcctgctggacgactcccacatgaatgaggagctgggcatcaacgaatttaccgcgccgtccatccgcaagatttttgaagatttggaggggctccctgaaataccggaaaaggtggccctgcgcgcacgtccggagcggcctcccatggaccgctgttccctggctcttcagctgggcggcatgatggcggacggcttcgtaatcgtgcagtgcggcaagatgaacgaggtgaaacccattgccctggatctttccagctatgcaaaggccattggcgccggagaaagggtgaaccgccacgccgccagcctgctgaaaaatgcggaagacggggatttgagcagtttcaaaaacaacctggcccttattcaatccgatgtggagcaggagcttgcctccctgcgggattccgatatggcgaacctgatcggcctgggggggtggatacgcgccctggatgctgctaccgcggctctggataacaaatttgcggaggacaaggcgaaggtcatcttccagccggatgtcccggaatattttcactatattctggacggggtagagccggaaatgaaagaacgccgcgacattgccaaaatcatgaaccttctgacgatcttgcaggagcagatgacgctggctccggacgccaggcccgccaaggcgggcgtggaagccattcgcaaaacgacgctggagttgatcaaggcggctctggcccctgtggaatcataattcctctccggaggcatgccgcatatggttcttccccttttaaccagtctggaagtgcgtcttactccgcgcggtctgtacctgcgggatgaaaaactgaaacggatggtccgggatgatggccgcgttcccgtgccttacaacgtaagcatcttcaatacgggggacggcgccgtgcgtatcatcggcaaaaagtggaccgtccgttcacatggagacggaacgcagataattgaaggggatgaactgttcggttcacgccccctgttgtgccaggggcagatttttgcgttcaacggccttcagatgctgcggctgccggcgcgcatccagttgactctccttgtccgggacgaggcgggaatcctttatcatacggatcccgtcagccttaaatggtgaaataaaaagccctgcaaattctaatatgtccgaatctaattttaagaacagcagtcaagaaactgattcattgggttactttccctctttggacgaatacaatcccggaattactgcggatatgtgggctacagccttagatgatgataccgttacatatccagaaaatctggatatgtttcgaaaaattatggaattgggtggagaaagtacctgcgcgcatttagccgaagtatatgggaaaactccttcatactataatgcgtggggaacccagttcagcagaagggtgaaaaagaagtacagctgtcccaattggataaatcgagaagatggaactgaacgatggaaaaatgaacgatggaaaaactggtgtattccttttgttggtcgctatgtcgtcgaaaacggaaaagagcgtttttcttggagattgcgagatgaattgaaagaggcacttatgaatatggatattacaatgggttctttgaaggagaaccccgtaaccgatgttggtttgaacaccatcttttacggccctccggggacaggaaaaacttatcacacggttatttacgccgttgcaatcattgaaaataagaaatggattgagatagagaaggaaaattactctgatgtattggagcgctacaatggatataaggcagagggaagaattgaattcacaacttttcatcaatcttatggatatgaggaatttatcgaaggaattaaacctgtcattactcctgaagatggtattggtggaggaataggtgacattcagtatagtgtgcaacctggtatatttaaaagattctgcgagaaagcgcaacggtcgagcacattaagaaagaaaaacttcagttttagagaatacccgaatatctggaaagtatctttatggggaacaggtgataaccctgttcgttcggagtgcttgaaaaatggccacatccgtatcggatgggacgattatggtaaggacattacagatgaaaccaattttgatgatggtggtagagtagttctgaatgcttttatgaaccgtatgcagatcggtgatattgtgttttcgtgttacagttctactacgattgatgctattggcgttgtcgtaggtgaatatgaatggcatgatgaatacgataacctgaaacggttgcgaaaagtgaactggattgtgaaagatattcaggagaatatactttccattaatggcggaactcccatgacattggcttcagtttatcgtctgtcaaatgtgacggttaatgatgtgtatcagattattgagaaatatgattctactccacctgcttttgtaaccgatagtcatgacaacaattatgtcttcatcattgatgaaatcaaccgtggcaacatttcaaagatttttggagaactgattactttggttgaaccgacaaaacgctggggaaatccggaaggtatggaggccgtgttgccttattctcaaaagtcttttggtgtaccgaaaaatgtatatattataggtaccatgaatacggcggatcgttccatttccattattgatacagctttgcgccgtcgattcttcttcaaggaaatgttgccgaagccggatgtcttggctgatgtaagcgtaaaagatttgtctgtcagtggtttgcttgcccgtatgaatgaacggattgctgttctgtatgacagggaacatacgattggtcatgcatattttatgccgctgaaaaaaaatccgacgattaaaaaactggctgagatttttacaaataacattattcctctcctgcaagaatatttctatgaggactatgaacaaatccggcgaatacttggcgacaagtttgttattgaaactaagtcgaaagacttgtttagtcgagaagatgttgtggatgataagtgtagctatgatatcaactatgctgcatttgatgatattgaatcctatcgttccatttgaaatgtaaagggaaacgaagttagagtgaactctttttatcaaatcaaagaatatgattcgtttatttctgataaagaaattgctggatataagactttgcctgagtctattttccagcaacttgaggattttattctgactaatcgcagcaaggataccgatgcactggagttgatgggactttctgcaaaaaagggcatcggaaaagtaatcacggcaaaaaattatgtcggtatcattacactgaatgatgggacaaccattgaaatcttgcccaaaatttactcggcaagcatggacgacaattttggtgccagaaccaaacgagtgttgctcgatatgctgagaacactacggaaaatgccttttaagtctttgcagaattcttgtgtgaatattgaaaaaatgaatatctttgaaatattcattcgaatgttcgtgaacgaggttttcttcattgtgaagcgtggtctcaaatgcagttatgaagcaattgcagagaacacaacattttttaagggaaagatactgttttcaaagcaggtcaagttgaactgttttcacaaagagcgcaactatgttgaatatgacgcatttacagccaaccgtccggaaaataaattgttgaaagcaacattgatttatctctgcaaaaggactacatcttcaaaaaacagaagcgatataaaaagtttgctgagtgtattttcaaatgtggaggcttctactgactataaaggggattttgctaagtatattagtgatcgaaacatgaaggattacaataccgcattgatgtggtgtcgagtattcctgtcgggcaagagttttacttcttttgctggatcagaaatagcgcttgcactgctattcccaatggaaacactttttgagaattatgttgcagctgtactgagaaagaaactttctggaagtggctttacagtttcagttcaggacaaaacctaccatctattcgatgagccaggtaagaaatttctgatgaaaccggatattgtggttagacgtaaatctgacggagtttcttttgtgttggataccaagtggaaaattcttgatgctggcaaagtgaactacggtattactcaggctgatatgtaccagatgtttgcctaccagaagaaatatggggcggaacgcgttattctgctttatcctgaaacagagaaaatatctctggaggacaatatcgaatttagatcagatgatgatgtagttgttcgagttcaattcattgatttgtttaacgtaacaaacagtattacagaggttatacaacaatttgatgtaatagcagtttaatcatttggcaacaaagatgtgttctttttgcgtttcttcgcagctatcattgcgaatcagcgaacggatttattaatcattcacctcggacgagtttgaaagatgggtaacatgaagggaacgttatttagacggtctcttctatttcattttaagagtacgacaaaggaatagagtaaatttatctttcgatcattttgctcacgatgatcctgttgagaaatgttttcccggaaccttgctatttctctatttttacaaaaacgggcggtcttgccgttttcatgccgagatattataaataccccaaagcgttgtcatgttactaaaaccttatctggacgatgaggtgtagaccaactttatcgccgaatgaaactgtatgtaatgaatcaatctgagttaaatccataaagatgcttccgggctaaccttcttcatcatccccgtggttgaggatgaagttcaggtcgtcaatgcccaggctggaggtaaacccttcgtcacccagcacgttggcgacgagctggtttttctgatgctggagaatgcggattttttcttccacggaatccttcgtcagaaggcggtaggcgatcaccttgtttttctggccgatgcggtgcgtacggtcgatggcctggctttctacggccgggttccaccacgggtcatacagaacgacataggaggcggaagtaaggttgaggccggcaccgccggctttcagggaaagcaggaagacggaggggtccttggtcgtctggaatttttcaatttctccgcggcggtccttggtctggccggtaagatagttaagcggcctgttttccgcttccagcctgttcttgatgatttccagcatggaaacgaactgggagaagacgagcactttgtgcccttcttcccggagctggtccagcaggtagaagagggctgtcattttggcactgtcttccttggcgtatttgggatccaccaggccggggtggcaacagatctgacgcaggcgcatcaggccctgcaaaatggcgaaactgttctttttgacggattcgtccgaatccaggccgagcagggcctgctgtatgcggcggagttccgccttgtacagctggctctggatgccttccattttggcgtacacttcttcttccgtcctgggaggcaggtcttttgccacctgggatttggtgcggcgcagcaggaatggtttcaggcgcgcggccaggcggttctggctctgcgggtccttgcgcttgtcaaagcgcttcttgaagtaggagcgggaaccgaggactccgggcatggagaaggccatgagggaccacatgtccagcaggcggttttcaatgggtgtgccggagagaacgagacggttgtaggaaacgatttcccgtgccgccttggctgccttggaatccgggtttttgatctgctggccttcgtccagaataaccgtaagccatttgatttggttcagggtttccccgcagacgcggagctgggcgtagttgaccacgaccatgtcgtaattcttcttgatgtcttccagattggcctggtctttgctgcggatgacgaggacgcgcacgcctggcgcaaatttttccgtttctcccgcccagacgtccagcacggatttggggcaaacgataagaaccggagggatgacgacttttttcttggatttgtttttgcgggcgaattcttcacgcagccagaggacgtaagtgatggactggatcgttttacccaggcccatgtcatccgccagaatgccgccgaacccgttcgtggcaaggtaagccaggaaatggaacccttccacctgatacgggcgcagggtggcctggagctgggagggaacatccggcttgacgtcgatctggatttccgcggtacggtccttgatacgtttccaggcctttggatcgaacacttctgcggctttcgggtccgccagctgcatggcgtgcatgcggtgggtttctccggaaagatcgaaggggtccaggcccaggcgggtaacggcgtcgcgctggtcattgtccagtttaatttccaggcgcatccatcctccgtcgtccatgcggacgtaaccgcctctggcggcgaccagggcgcggatttgctccttggagagctggacgccttccacatcaatgacgatgcggaggtcaaaccagtcgatttcctggttgactacttcaaaccgcacggcggcggccaccggatccgccagcagcgtcttgagcttgtcgtccatattgacggtcagctctttcggaagctgtttggcccattccgcgaatttttcggggaactggcgggtgacgcgggccttgaacgcgcccacctggggatcgtaggaaaagcccatttcttccagcaggccgggaatgggataaaggtgctcccggatgaagcgcagcagaactttgttcttcatgggctcctgatgggatacgtcccagccgtccttgccgagtttttccgtgcggtagccggaagcgtccctggcgcttacttcgcagagcacgtgttccgtttccgcagaggtgaggccgcggacgattttcatgtcaaaggtgccgcgcagatcgatgtccaccacgcggtcttccatgctggggggcagggaagcgcctattttacggaggaattccaccccttcaaggctgtcgatgacctgtttgggaatggagtagcggggttccacttccgtgctttccagccagcggggggggccgggaaagacggtttcgtcagactggtacagttcctgctgccccggaagctgccggacggagtgggagacgttgatgccggtggaagttgcaagctgaagagcgtagcagtccggttcaatgggatcgtccaggcaaatccatttgagcggttcgtccaccactttgaaatagttttcatcaaggttcaccaggtagcctttcagggcgggctggtggaaaagtttgttcatcagggcgcatgcggcctcctggtccagatccagtgtcagggcgtcttccgcacggacgtagtcggacagggagacgagcaggatttccgtctgggcgtccatgcgtacggcagcccgttcatgcagattttccagatgttccagatcctgtttttcccggacgggaatccagtcctgcttcagggaatggcggtattcgaaatgtccctcgttaatagtggaaacaagcctcatgaacagttctccgcggggcggctgcggggggcgttcattcacggattggatgcggtcataccaggtgccgacttcacgggagcgctcccattcatgaatcttgcgctggaccttttccagatccgtaatggattccatgaattccgggtagggcaggcgtttcttgttgaaggcgtaagcaatgtaattccagaattcgaggatgtttgtgggaggaacgggccacaattccagcgggtcatagctgacgatttcccatcggggattcaggcgcaccatatcatggtcgtgaatctcctgttcaatggcgaaacggcggtagcgcttttccagtttgctgacatagtccgcttccttgtcgtccagttcgcgtcccagtttctcttccagaatatccagaagaggaacatcattcagttcgttcggggattccggaaggtcctggccacggtacatgcgctccagcatggcggcatacatggccgctccggccagatcctcgtcttccgtggaacatgctccgaaccacctgttgccctgaaggcgcagatttacgcggtgcacgccgtatgcgtcttccacgcggccctgaatatataaatgattgccgaaaatttgcgtgactgcgccatctttctggagtttctctccccgcagccggatttcttccggaaaggcattgagaaagttcagagtagccctgtccgggttaagtgccatgctcataatatcaaactgtcatataaaaattggaaacaagcgttcccagtcaggggacgccacaggtctatgcactttactatggcacaaaaagcggattagagcaactattctctgaaaataattccggaggttgtttgtggtgaagtgtttattattggatgacaaattgttatgtttatgtgaagaaggtcgatttttgaagaaaacgaacatattttatcatcttggaaagaaaagatatcagtcttgcgtaacatgattcttgacaggttcgtcgtaaaagcgtcttttatgcctgaaattttatgtcctctgcatcacttctacagttactggcgactcaagcccgcttgagcgatggcgaattggccgaacgtcttgacatgactgaagaagccgtgcgggcccagcgggaacagtgggagaaggaaggcgtcatcctcggataccaggccgtggtgaatgaggaatatgagcacgacagcaaggtggcggccttcattgaagtgaaaatgacgcctgaacgcgacggcggttttgaccgtctggccatgcgcatctcacggtttgacgaagtgtcctcctgctatctggcaagcggcgggtttgacctgctggtgcttgtggaaggaaaaagcatgcgggagattgcccggtttgtggcggaaaaactttctacgctggaaggggtgttgtccacttccacacacttccatctgaaaacctacaagaaaaacggttgtgtgtttgaagctcccgtgcagacagaacgcctggctgtcgctccgtaattctctgccgttaagaaaggaatgatcatgaattggcagaacaaaatagcggagcaggtaagctccataccccgttccggcatccgggaattttttgacctggtcacgggacgcacggatatcatctccctgggcgtaggggagccggacttcgtgacgccgtggaatatacgggaagcggccatttactccctggaaaagggtcatacctcctatacatccaattacgggttggaatccctgcgccgttccatcgtcaaatacgtggacggatttttccatgtcaactacgatcccctgcgtgaagtgctggtgaccgtaggcgtaagcgaggccatagatctcgctctccgtgccattctgaatccgggggacgaggttctttaccacgaaccctgttatgtttcctatgcccccagcgtcaacatggcctatggcgtggctaccgccgttcctacgagcaagagggatctttttgcccttaacccggaggtgctggaagcgtccattacaccgcgaaccaaggtgctgatgctcaacttcccgacgaacccgaccggagcggtggcccctgtggaaactcttcaggaaatcgcccgcatctgcatcaagcacgacctcattgtgctgacggatgaaatttacagtgaactgcgttatgacggcaagccgcatgtttccatagcttctctgccggggatgaaggaacgcacgcttctgctgcacggcttctccaaggcattcgccatgacggggttccgcctgggttatgcctgcggtccggagccgcttatttccgccatgatgaaaattcatcagtattccatgctctgcgcccccattacttcccaggaggcggccattgaagcattggaaaacgggacatccgccatgttgaaaatgcgggaaagctaccgccagcgccgggattacctggtgaagcgccttaatgaaatcggcatggactgccacctgcccggcggcgcgttctatgtcttcccggacatttccagatttggcctgaccagcaaggagtttgccacccggctgctgatggagaagcaggtggccgccgtaccggggaccgccttcggcgcgagcggagaaggtttcctgcgctgttgctatgcgaccgcctttgaccagatcaaggaggcctgcaaccgcatggagcatttcgtgaaaactctttcctgacccggcagtattcatgaactccgtgacggaggcgctgaaaacaaaggcgtacgtggcgccgtttgcggtattcatgggctttaccctggtatggcagtttggcagcccgtttctggaatgggaccacccggccgcaccctggtggagaagggcgccggaacaatggctgtatcctgttcaggcaatcgtttgctttgccctggttttccggtggagaaaggccattgattgggattggcggtggaaacccgccgcctggggaatcctgttcggcgtgctgggtatcctgtgctggctggccccgaccatgatagcggaccgcctgcccggaggcgcggatgcctggtttggtcatccctcctggccctggtaccggtatctgctgggaattgacgcgcgcccggaggggtttgatccgggcatcgtcttccttacggattcctggagctggctggcggccctggtgctgcgtttcttccgtgccgtggtcgtggtggctctggtggaggagcttttctggcgcggctatctgatgcgcctgatggtgaacctggaccatccctggaaggtgccgtttggcacccatagctggaaggcatactggatgactaccctctgtttcatggcggtgcaccagcctgtggactactgcggcgcgttcatttacggttccctggcgtatctgcttgccgtctggcggaaaaatctgtgcgccgtgattgtgatgcatgcggcggcgaatgcgctgctgggctgggccgctctggcatggggcaaatatggattatggtgaatccggcgtttacagggaggaatttcttgagtacataaaagccgatgactccagaggaagccatagcaattttatgggattaccaccatgtgaagcaggagctgcgtccggcggaactcatttttattcttggcagcaatgacataagggtggcggaatatgcggcggaactttatgcccggaagctggctcccctgttgctcttttccggcgggatggggcgttttacgggggaatgggccgtaccggaagcggaacttttcgcagaggctgccatgaagaagggagttccgggagattgcatcctcattgaaaacaaatccaccaatacgggagaaaatgtctgcttttcccgcgctgtcctggaaaaagccggcattccggaaccatccagcctcatcgccctgcaaaagccttatatggaacggcgcacgctggctacgctccaggcccagtggccggaagcgcgggtggcggtcagctcccctcccttcacgttcatggaatacctgactggggaactgccgcaggagctggttgtctccgccatggtgggggactttcaaaggatactggaatatcctaaacagggattttccacggaacagcctgtgactccggaggcgatggcggcattccgcatgctggtggaagcggggtatggctcccagctgctcaagggtgtcccccttccttggaattcttgagaagacacgctttttgcttttactgaatgctgattgcgggcatcaatacaacccgcatagccaacccaattatataacttatcatggcagacagaaccaacacagaccccgcccgaatggaaaaaatcgtgagcctctgtaaaaggaggggattcatcttccagtcagctgaaatttacggcggtctgaacggttgctgggactatggtcccatgggggtggagctcaagcgcaatctgaaagaatactggtggcgtaaaaatgtgcaggaacgcgaggatgtggtcggcatggacggttccatcctgacgcataactccgtactggtggcttccggccatgtgggcggattctccgacccgatgtgcgattgcctgttgaccaaggagcgtctgcgtgcggaccaggtcccggcccagagcggcatggggtttttctataccggagccgccaaaaaagacggttcctggaatattgaaaagaagtactccgttctggtggaatctgaaaaacaggcggacaaggcccgtaagaccgcggctcaatattatgcccagctggccggcaaggatgcctcttacaaggatatggagctgaaaggcgagtgcatggaaaccgtaacggattccaccatgtacaatcctgctaacggttctctgctgacggaagcccgtgagttcaacctcatgttcaagacgaccattggagctacctctgatgaaaacgatcccaacgctacgggctggctgcgcccggaaacggcccagtccattttctgccagtataagaacattctggacagttcccgcgtcaaactgcctttcggaatcgcccagatcggaaaatctttccgcaatgagattaatccgcggaacttcactttccgttcccgcgaattcgaacaaatggaaatcgaatatttctgccggccggaagacgggctgcgcctggtggatgaatggctggaacaccgtctttgcttctatgacgaagtgggggttccgcgcgaacacattcatattttggacgtgccggacggcgaacgcgctttctactccaagaaaacctatgacctggagtatgaattccccttcggcatccaggaactggagggcatcgcctaccggacggattatgacctgagctgccatcagaaaggttccggccgtcctctggaatactttgacgaagagacgcgggagaaattcattccccatgtggtggagccttctgccggttgtgaccgcaccattctggccattatctgcgaagcttacgatgaagaggaactggtggacgacaaaggtaaaaaagacgtccgcacggtgttgcgcttcgtgccccgcatggctccgatcaaggcggccatcttccctctgcttaagaaaaacggggaacaggtgcgtattgcccgggaaattgaaaagacgcttcagccgtggatgtccgtcttttatgatgaaacgggagccgtcggccgccgttaccgtcgtcaggatgaagtgggtactcctttctgtataaccgtggactttgaaactctcggggaaaatgatgcttcgctcaaggggacggtgaccattcgccaccgcgactccatgaaacaggaacgtgttgcaattgaagacctgctgcattggcttattgcccgcatacgttgatgttttttcagcggctttgatgccgaaattccttcagagccgttccgttgacagcggaacggctttttattttcaaaacagcagtgaaaaaagggggctgaaaaaccgataccgggcgtgatttttccagaagagagcccgttgttccggagtcggtatgactggaggtctgtgcatttttttgatgctgctatgcacggctgggaatggatatttcttatatgttcactggaagcatatggaatgaaatttcaatgagagttattgacgtcccgccagcaaaagagggaaaatgacgggtgaggcggttcaggaaaaacgtcctgatttttgagcttttttttctcctctgctgtcaaaggtttgtacggcatggaatgatgcgatcaggtagaaagaagatattaatgatggaacattcagtaatttttccggaccatcggaaggtttgcgccctggggcagggaacctggaaaatgggaaagtcagcgttgagggaagccgatgaaatagatgctttgcgcgccggcattgagctgggcatgagcgtagtggatacggcggagatgtatggcaacgaggaaatggtgggagcggcaatccgcggtttgcgcgaccgtgttttcctggttaccaaggtgttgcccggcaacgccagcaggacaggaaccaaagcggcctgcgaacggagcctgaacaggctgaagacggattacgtggatttgtttctgcttcactggggaggtccccatcccattgaagatacggttgcttcaatgattgagctgcagcaggagggaaaaataaaagcatggggcgtcagcaatatggacgttccggaaatggagcggttttacgccgtcccgggaggagtttcctgcgccgccaaccagattctttataatctggcccatcgaggtgtggagtacgatttgctgccatggtgccgggaacgccaccttcccgtgatggcctattcgcctgcggatgaagggcggctttcccgtaatccggtgctgatggagattgcgcagaagcatgaggccaccccggtgcagattgccctggcctggattttgcgctgccctggaatgattgcgatccccaaagccggttccgtcacgcatgtgcaggaaaattaccggagtttgtccatcaggctgactgcggaagatgtggatttgctggatggggcttttccgcccccggtcagaaaggtgcatctggattcctggtaaaccgtgatgccgtccggcagttggggagaagcgggacgcgcggattttcctgccgcatcagaattgtttcaagcctttcatctgtccgggatgaaagggcgccagcgggtaatttcaatacacgcacgccttgtgggtagggtattggctttttgttcatgcggccggggaatcttctgacgcgtttccggaaggggacttcccggtttttccctttgaacagaggatgtgccgttttccggttccggcttcttcagtagggaagaagattgaatgcggctgaaagaaagccgcccttccgggaatacggcattccggagaggcggctccagaggaggcgggataataaagcgctacagcggctgagcgtccgtcctgggtatccagacgggcgtgttctggaaggtgctggcgtagtaccaggagccgcgttccgcgcgcaggatgagcggggtggattccggaagggtgatgagcgcagggctgttcatgtccgccgcatgtctgccgggcgttttttgggtaacgaccagtaaccgatccgccggaatggattccggggtttccgggtacatgatgtagttcatgacagccgctactgtgaccagtccgctaagggtggccaggatggtcagcagggccccgtgtctgcgggtaacggtcagcagggccaggaaggtgagcatgacggctccggacaggatggagatggggccgagcgtatcatggcggatgtaagtgagccactggttttccgtggtgttggcgggcaggatggcgccctccttgcgttcgatgaattgcaggttgtattcagcttccgtgaagtacggggagagttccagagcacggcggtaattgagagcggccaggccgggtttgttcatgcggtaataggaattgccgatgccgaaacaggcgtaggcgcgttctgccttggaaaggttcatattgccgctttccttgctgaaatagtcaatggctttggcgtactctccctgttcataggcttttacacccaggttatccgtttccgacgcgtttccggttgttcctgccagggacagagccagtacggcggccatcatgagaacgggaagcttggcgatggcttttttaatagcctggagcatgtgctggcgttccgcatgcggcagttcttccgaagattccgaaggcttgaatgccctgtcgtcccggagtttaaggatatctttcattttttcattctgcttggaaggtggaatataggattcaataaagttgccggcggcacgcaggaattccgtggagcttgcctggcgcggagtggaagcgagcctgcggaaggctctcatgcgttccctggccgtgaagctttccttccggattttccggatgtagcggatcagagccattcccagcaggatgacggcggggatgtaggccaggaaataccacccccagtgagccggggcggtaagggcgttcatgacggtggcgggcatgagcccgtaaatatccgtcatttcagctaccggaatggtacctgccgggggaggcgtggcgggagcggcacctccggccgccgttccagtaatggctgaggccttccattccaggggaatgggggctgtggttacggttttgtactgttgcgtgctggggtcaaaaaaagtgagttcaaagggagggatggcatccgtttgggcaaccggacgcatcatttgctgaaattccacggttccctggatggagcgcgtattctggcccgggtccagcttgttgggaggatagagtttccagttggaggcgtctgtgagggccgggcaggcgatactgtggatattgcctgttcctgttaccctgattttaacagtaatgggttcattggcactgagatcccgcgcatccgtggtggaggagatgcggaaattccctacggcattggtgaaggaagagggagctcccggggggagttcccgggctgtgattttcacttccggaatggccatttccaccagtacttccgaacggatgaagttggcgatgagagggtccgcctccggcagggcggcgcgtgccgtgacagtgccggacgccgttacctccccggcgcgcagcgggaacagggtgctctggaaggtcatgacattccagttgacgcctttgtaaagtacagaaccgcgaggctggccgcggagcagttccaccagcgtgggttcaaagcgccaggtagccaggttggaggtggtgatggcgggcgccgtgtattccagaatgtattccggggcgtaaattttcagttcgcagcggtccggctggtggacatagggtttctggttgtccacatgccacagcatgccgtacgggactgctgtgccgttcaggttcagcgtattccatttgatggcgctgtaagggtagacagtcagcgtctggggaagcgtggtataagtgcggccattgttggcctgcagggtcagggaagggatttccacggtgcccacttcgtccggcgttacttcaatggccatcaggaaggcggattggttgggagaccccggccagcggatgtagttgccctggctgacccagcgcaggctggcgccctttacccggggaagcgggtcctggcgggcgatgcttccgtctgtcaggatgatgaagagacgggtttgttctcccggcacaacggcatcggacagccaggtggtaaccacctgctgagccataagcgtgacagtcatgcagaagaaaagcgaaagaatggcgagcagttttttcatcttgttttgtgggatatgtttaaaggggtggcttcgcggatgcgggcggaacgggttagtaatccttatccggaggaatttccggagaacgctggggaacggggcagccgggttcaatgtccctgcgttccatcaggatggctcttgcttccctgcgttccttttcctccctgctttccttttgtgcggctgccggaacgggcttgttatcttccggctggggctgcggtttttccattccggacgtttctggcagcctgtctttttccggagaggagggaagccgggcgtttttcatttcattttcgtccctcttgccttccttggtttcggcgttatccttgtcttggtccttgtcttggtccttgttctggtccttgttctggtccttgttctggtccttgttctggtccttgtcttggtccttgttctggtccttgtcttggtccttgtcttggtccttgtcttggtccttgtcttggtccttgttctggtccttgttctggtccttgttctggtccttgttctggtccttgttctggtccttgttctggtccttgttctggtccttgttctggtccttgttctggtccttgttctggtccttgttctggtccttgttctggtccttgttctggtccttgttctggtccttgttctggtccttgttctggtcctgttgttttttcttctcttcttccaatttcttctttaattcttccagctgccggcggtattcgtccagggatttatcataacggagcatttcctccttgttggacgctgctccttcatgggaaccataggcagagagcgcatcgtcaaaacgtttgacggcctctttaacatgttttttcgcaacgggtatttttgccagccgggcatcaatttccttaatttggtcgtcaatggaagagagccgggcttgctgctgttccccttccggcctggagaaagtcatggtcttgcgggcctgggcggcttccaggttgccaaggttgaagtgggaatccgcctggagggctggtttgggagaaaggagcgcctgggagaaagcttccgcggcttctttggggttatccgctttttgttccaggcatcctttggcgaattccaaggcctggcgcgtttcttccgccaggtcgggaacagcgagcatttcatcaatggatttgacggcttcttccgtttttcccgtccggatcaaatccgtgacattgtccagggcgtgcgtgtccgcctgcgcttcctggcccagcaatccggcgcagaataacgccgcagcagtcagagatgtcataccgcggcgtccggaacggcggaaggaacgccagcgtgttcccgccagaagggtgaggagcaggcagatgagggccggaacggcaaagatgatgtagcggtcattcggcacgcggcgcacttcttccttgccttccgtggtatccagccggtccgcgatgtccttgacgaagcggttcagcgccgctccgtcggagagttggacatattggccttccgtttgcctggccaagtattgcaggctttccggattgagcttggagacgacgtgctggccacgacgatcccggtacaggccggagggggattgctcatccggaatagtggtgccgatagtagtaccgatacccgctgtcacgatgataagctggtgctgccgtgcggcttccgcagtcttataggtgatgttgacggtgtcttccccgtcgctgaggatgaccagggcgtttttggcgtccgcttccttgtcccgtttgaaggtttgaagggccagccgcacaacgttttccaggttggttcccccttgggagacccagccgaattgaagttgttcaatggtttcttttaatgcgttatggtcatgggtaaggggcatgagcaggacggcgtccccggagaagatgatgatgccgaagttgtcccccggcagggcgtccagcaggtcgtaggcggcggtttttgcccttcccaggcgggtcggggaagcatccttgctgagcatggaacgggagcagtcaatagcaatgaggatgttgcgcgatttggggatttcctttacctccgtgtagccgtccaccgggcgcgcaatggagaggatggcgaagatggacgccagcacggcaaagatgacggggagcacccggtgccaggtggccggagcgttaaccagttcccgccggtattccggcgaaacgagcacttcccattttctggaacggcggcgccacagccaccaggccgccgccgcgagcagggccgggagaatgagcgcgtacagaacgttgggataaaggaaagtcatgacgggtgaagatcggtattacggggcgggggccggtttgagcacttgcagggagaggcccagaagcgccagcgcggctcccgttacaaggaagtacatgaagtattcttcaatgtggcggacagtttgcactttggcctcgcttttttccagcttgccgatggaggtgaacgctttattgaaggaggccatattggtggccctgaagtgttctccgcccgtgagctgggctattttccgcagggttggttcgtcaaattcactttgcaccaccatgccgttcgccagggttccttcttccgtgcctacggcaatggtataaattttgatacccagcttggccgcgttttccgccgccaccagcggggatatctggccggagttggaggcaccatccgtcaccaggatgatgatttttgatttggtgttcttacggtcgtccagccgggtggccgccgccgcaatggcggagccgatggccgtgccgtccgcctggatcatgcgcggatggaaatcccggatgatgctgttgaccagggcgtggtccagcgtgagcggacagaaggattttgtttttccggcaaatcccacgataccgatgcggtcgtccggacggctgtcaacaaattgggtgatgacgtgtttggcggctaccagccggttgatgggcattcggttgagaaccatgtccggcgtttccatggagtaggaaaggtcaaaggcgatcatgatgtcaatgccgttgactgtccggaaggttttatcttccacgtgctgggggcgcgccagggcgatggcgatggcggcagccgccagaacgaagcaaagggcccctatttttcctgccagggattgcggagtacgcgccagggaagcgatgaagcgcacggtggggtaggtgatggagccttccgccccgcgcctgcggcggaggatgatgaggcacaagatgaagggtaaggcataaagccattcaggttgtgcaaattggaagtgttccgtcatggtatgctagcgttggttgaagcgggatgaagattttttgacgacaaggtccgtttcttccttcgtccggtgggcatccgcttctatatcattgatgagttggaccgtagcgttcgccaattcgttgaccatggaatcgttttccggggtgtccggttcatatttgagagaagccatgcggtccagcagatcgcgcgtgggggcctggagttcggaaggcagcgcggtgagcgcgtccgcccggcggttgaattcctgctgggtttcatatagtgccgggtctttggtttctcctaccaggtatttgcggaggatcagggaaaattccacggcggcctgcctgagggagggatgcgtgttccggagcatcgagatgtcccggatagcggtttccgacgggctgagcggcgcggcggggatgcgtcccttcctgcggatgagcacgatgacggcgatagcgacggccagaaggatggaggccaaaataatccagatgccccacgcgccccaaaagcccgcttggaagtaggcatccggggattgtgtttccatcagggagggaaacgccggcggttccggaattgccgtgggggggggctgaaaggtggcgggggttggcatggctggcggagaagaggattagcgtgaaaatttacgggatcttctggcaaaaagggcccggaggggaggcatgaagttgtccgtggtctgcaagtccaggaagtcaatgcccaggcggcggaaatcctgcgtccatttctcgcggtgcagatgaacgacgttggcgtgggtttcccggacatcctgacgggaaaggttcaggaacatgcttttgccagtttccggatctttcaggatgacgcgtccggcatccggcagatgcagttccatcgggtctgcgatgcggatggggatgaagtcatgcttgaagttgagctgccccagggcggctttattgttctcaccccaaaagtcactgatcatgatgaccatggccgcttttttctgggaaaggacaagttgccgggctacatcggaaatgttctggtcggctccatcgtttttactggctacgatttcgcggacgatgcgcagggtctgcttgactcccttggccggggggatgtaatgggagtggctgttcccgtagatgaggatgccgcatttgtctccgctctgggcagcgctgtaggcgagtactgccgctacttccgccgcatagtccagtttggagacgcgggccgcggaggaggcgtagtgcatggagccgctgacgtccaccgccagaatgacggcctgttcccgttcctcccggaaacggcggacaaaaggggagttcatcctggccgttaccttccagtcaatgaaacgggggtcgtctcccggcatgtattcccggaagtcgtcaaagtccagcccctgtccgcggaagccggactggtattgcccggcgaagttttccgtggccagatgcctggcgcgcagttcaatgcggcgtacgcgcttgagaatgtctgaggctttatccatgaaatgattttccctgtttgggttcaatcaggttccggcaaggcgccccttggggcctgaaggataagggcgggcgcggaagcgtccgcctcctgccgtcacggcacggggactttcgtcaggatgtggtcgatgacgtcgtccgtggaaatgttttccgcttcagcctcataagagagcaggatgcggtggcgcaggatatcgtgggccaggtccttgatgtcctgtggagtgacgaaggaacgatggtgcatgaaggcattggcgcgggccgccagagccaggttgatggtagcgcggggagatgcccccgcgcggatgagaccgcgcaacttcacgtccaccgtttccgggaaacgggtggcgcgcaccagatccacgatgtagccgcgcacggcgtcgtcaatataaatctggtttaccaggtcgcgggaggccgccacctgttccggcgtggtgaccggggaggtttccggcggtttggcggagctggccatgaggtccagcacctggagttcttcttcgcgcgtggggtaggtgaccagcaccttgaagagaaaacggtcaagctgggcttccgggagctggtaggtgccctcctggtcaatcgggttctgcgtggcaagcaccaggaaggggtccggcaggcggtaggtggtttcacccagggttacctggcgttcctgcatggcttccagcagggcggattgcactttggccggggcgcggttgatttcatccgccaaaatgagattggcgaagatcgggccttttttggctgtgaactgcctttcttctggattatagatcattgtgcccagcaaatccgccggaagaagatccggcgtaaactggatgcgggcaaactgtgcatgcagcgtgcccgccatggcttttacggagagcgtcttggcaaggccgggcacgccttccagcaggacgtggcccttgcagaggagactgaggattaatctgtccacgagcgcctgctggccgatgaccaccttgccgacttccgttctgagagcagaaatccacgatgagttcgcggcgataatttcgttgaattctcgggtgtccatgattctgatagcgggtgagacagtatgccgggcacttacgttgaaaaaatcctattatttcccaagggcaaatccggttttcaacaggaggtcttcccggaaatggggagccatcatctgaaagcccacgggaagttccatgccgctttccctgacggttccgcagggaatggacatggcggggaggccggccaggttggcggggatcgtgtagatgtccgccagataggtctggaggtgatccagcgcggaatctccgattttgggagcgggagcgggcgaggtggggcctacgatgatatccgccctggaaaaggcttccgcgaaatctctggcgaccagggagcggactttttgagcgcgggagtagtaagcgtcatagtaaccggagctgagcacataggtgcccaggatgatgcggcgcttgacttccggcccgaatccctcttcacgggtgcgtgagaagagttccaccagtccggcggcgtcttccgccctctttccgtagcgcacgccgtcaaaccgggagaggttggaagacgcttccgcgcaggcgatgatatagtaggcggcgacgacggcatctgcgtggggcaggttgacttccaccagctccgcgcccaggctttccagctgtttgacggtgttttgcacagcctcggaaatgcccggatggttgccggaggtaaagtattccgaagggatgcccactttcagccctttgacgtcacggcccagcgcagcttcaaagtccggcacggggcagtttgcggatgtggagtctttacggtcgtgtccggagatggcctggagcaggatggcggcgtcttccactgtccgggtcatggggccgatctggtccagggaagaggcaaaggctaccagtccgtagcgggaaacgcgcccgtaggtaggcttgaggcccacgataccgcagtgcccggccggttgccggatggagccgcccgtgtcggaaccgagtgcggcaacggcggtagcggatgcgacggcggcggcagagccgctggaggagccgccgggaatgcggtccggggcttccgggttgcgcgtgatgccgtaagcagagttttctccgctggcacccatggcgaattcatccatgttcgtgcggcccagcgggatgccgcccgcctctttcagcaggcggatggaggtggcgtcataaggagcgacataaggggaaagaaggcgggaggcgcagcgcgtcggctggcccaggacattaatgttgtccttcacggcgatggggatgccggccagggggctggaaatatccgctccggccgcggcgtggagggctgcttcacggtcaaaggagatgtaggcgttggttgtccggtccgcctcaatggcgtccgccgtcaggttgaccagttcggcaggggagagttccttgcggcgcaggcggtcacgccactgggccagggtgccttgaatttttgacatgagaaggaaagggtaaagacggttgaaaggtgaagggaaaaggaagcgggaggatcaggcggattccaccaccttgggcgtgcggaattgaccctgggtctgctggggggcattggaaagggcttcttcctgggtgaagccggtttcaggaatgtcttcgcgcatcacatccattgccgggagaggatggttcatgggggcgatgcccgtgacatcgtaggattccagcttggtgatataggccaggactttgtccagatccttggagaagagagctatttcttcctccgtcaggtcaatgcgtgccagcttggcaatgtaggctacgtctatttggggcgtgctcatggtgtaatgtagaaaagatgcggaaaagaaggggggggctgcctactgttgttccagcaggcggacgatccagcagaaggaaacggcgatggcgcagatcaacaggcccagcagcatgaagttttctcgcagttcccgcctcatgttggtggcgcgtccgtcacgggccactacggcacgcagtgcccggttctggttgccctcccgaacgcggtcgggaggcggcatggtattgcggtccaggcgcatgcgggtctgctgggacgggcgtttgagagaggcttccaattcctggatacggctctcaatttcccgtgaggcgcgatccagttctgccagttcggaggaacggcgtttggtttttcttttaatcatgatgcggaagggctgaaaatccagatgaaaaagaggatgatgagagcaatcaggagcaggggaagatggaaggaaagaccctggaggaactgggtcatgaattcacgggagctgatgcgcactttgctggagcggcgtaccccggtgagcactttggtatgctgcatgcgcgcgcactgctggacggcatccgcgaattcctcctcgcagcggtcaatgacctgctggccctggctgatgaggttgtccgtattttcaataggccattcatccgggcgcacggtgctgagcattttcaggctgcgcgtcagcgccatgtggatttgttccagttcattgctttcctggcggaggctttccacctcccggccgatgaggtctgcggcgttgaccatgcggtcgcccagctcgttctgctggtccataaacctggctttgcgcatatggcattcttccaggcggcggcgggagttttccacttcctccttttccttccgcaattgttccagcctcagctgggcctgttccatatcggcgtccacctggtcgtctgcctgggaattgtaaccggggtcggcgtccatgcggcggtattgagggtgacttggtctcatatgcggaaaaaataatgcgggccggcgtaagggattacagcgtttccggtcctttttgccggagcggggaatccctgcgcgtgctattatttaactttcacaaaataaatcaagccaagaagaagacagggaaagattttccggatgcgttcccggcagggaatgccgccctgttttttcttccggagccgtgcgttccggatatccggggggcgacaggacgctccgctttcccgcaaaggagggggaggtgcgctttttttatggtcaagggcatggatttgctggtatgtaggaagcatgcagtctgacacggtagaatgtaagccgaccatgtggtttaccggcagggcggttatcatggctctcatgtttctggggttcggagtgtatttttattatgatgcttccaccggataccctcaaaaaaacctggagtttttcatgcacaaggcgttcgtggacgctggagccgtgtttgaccgtgaggtgagcgggaaaggagcgtccgcggaggactgggagcgcattgttctggcgcgcactgtggattttccggagggctacgaaattccttccggcgtgaatcggaacgcggtgccgtggcctgacattttggcggattacagtctgatgtccacccccggcaagggttggagcgctgcgtggcaatcttattccggggaaaagcactatcccatcaagccggtggaccacccgtatgacgcctccaaaatttttgaacagtgggtggccgggtgcatttgcctggcgcttgccatggtggctctgtttttcctggtgagaacgcgcggcaggaaaatgtccttgaacgggaaagaggtgatggccgccggcgtggttttccgcgtggatgacattgcccgtctggatttgcgcagatggaaactgaagggactggccatagcgacgctgaaaccggaatgcggaggagcccgaatcaggctggacggcctgacttacggcggcttccggaaggaggattctccccataacgcggaagatttcatgaaggctcttctgtctctctacagaggagaaatagtggattatgaagaaattcctgatgccggcgggccgcctgcccggcaggaggacgaggaacgtgccgtatgagcgaatcccttccaccggaaaagggcgccaatgaccgtgcgttcggcgtcgcctgctggacgctgggtgggctggcgtttgttctgttgctgatggtgggcgtttctttcagcctgtctgtccgtaccgtggtggtggaaaaagtggtggagaagcctgttcccgttccggcacgggagaagccggagcgtccggccggagtcgttgaggatggggcggctgaggagaccgtgcatatggcggatgttccggcatccccttctgaaaagccccgttccgtggaagaaatgctccgggaagccgatttgtcagatccggctgccgattctgtaccggtggctgcggccgttgcgggagggggggattccgctagcggggcatcccttcctgctgagaatccggacgaggtcatgccccccatgacggaggaagtggcggagcttgtcaaggcggctcgttacgcccagattgaaggtgacctcaaagtagcggtcgtgaagctggagcaggccatgaggctggagccggataatccggtggtgctttattattatggacttacctatgaatggctgaggaatgcggataagtcacgggagttttttctgaaagtatatacccagcgggagaaggcggggaaatattttgcgcgtgcggcgcggcaccttcaggccggcttttccagcccggcggatttgcggggggatatgtccttcggcactattctggaataccgggatccggaatgccccgccggggagcgcgtcaagctgatggttcctattctgatgaaggatggcctgaatgtcaggccggaggaactgcgcgtcattgtccagttttttgacaaagtcaatgggaagaaagtggaaaagacgcacgcgcccgaaccttcttcccggtgcgttacggaacccgcggattgggcggacggtgaggaaatcatggaaataacctactacatgcctcccctgacggaagaagagacgattgcttatgggagcctgaaatattacggatataccgctaaattgtattacaagggggaaccgatggattgccatgcttcccctcccgtgttatttttactggaacagatgaaccagagttccccttccggactgcccgagatttatgacggcggtttgcttccccctgtagaggcggctccggtttctgagtcttatgaatcccttttgcctccctgatgcctgatttgtccaatgtttgatcttccccacaactttggcgattacacgctggtggcattcattggccgcacgcgcggaggaattctttatcaggccatccagcagggcatggaccgttccgtgtttctggagttgctggatccggacaatccggagggggtgggcgtggaggattttctgatgaaggcccgcacgcgcgccgccattaatgctccggtgctgggcaccgtctatgaagcgtcccaggcccagggatactggttcgtcaccagcgaacagctgggaggctcatccctccagtccatgctggaccgcgggcagaccctgtccatgaaggatttgctgaaggtgattgaaacggtcggcaacgtgtgcggcaggtatgagcgtctgcggaccgctttcaatatcatggagccgcgtcacattttcctggatgacaagtctgccgtgcggctgatgaatacggccgtgcccggtgactttcacgaagaaacatcccgcgaccagatgaagcgcctgggcatcgacctgcctcctctggtgactccggatgtgcccggaaccacgcggatgcgcaccctgctggaatggatgagggaagggcagaacggaaagccgatgcaatgggaccaggttatggagctggttgctgcggtccgcgaacagctggggctttcccctcgggttaccacccaccgctataccgtccccgtggaatcccgcggaaaagccggaaaaaggctgctttgggccggaacgggcctgctgggcgcggggatagccgtggctgccgttctccttttatttccccgggagaaggaaaccgtatcccgtccccatgttccggctcctaaacattatccggatttttccgccagcgatcatacggaagtccgcgtaactcttcccggaggaggggaactgattgtgggagcccatgaaattaccctggaatcctaccgcctgtttttggaccagtgggcacgcctcactccggagctgagggaggaatattcccacccggaccagccggacaagaggactgcctcccatattccccaggactgggaggctatgtggaaggcggcttccacgccgggaggcaaatggaaaggcaggagaataacaccccgctctcccgtcgtcaacgtcactttctgggatgcctgggcgtatgcgagctggaagcccgtggcccccggagaaccgcgctaccgcctgcccgagcgcggggagtggatggctctggggaatatgctggaaacgggtgagaagggggacaggacgctggtgattgacagatacagcaatgatcatgatttaaagaccggcgtgtgcggcatggcttccggcgtgatggaatggacttcttccatggaaaaggatcctgcgcgcgtgaaggagcctccggggccggtggcctgcggcggagactggaggcagcccggcatctccaaccgggtggaatacctgcgctcccgcggtgaaagtcgggacaacctgggattcagaatcgtgcggaatgtccgctgacccgtttaacgacaatacttaacatatcaataccatgaaacatatccttgcaatgctgctggcccttctgggggcgtccggggccctggcccagatttacgtgaaagtagtcccggaaaagaagacgttcctcagcggggaagccatgtacatgaggctgaccattaccaacaattccggcgtgccggtggaactgaagagccgggaatattcctcctggctggatatccatgtggagcattccactgcgggggcggaactcccccagtccaaatttgccctgtttccgcctctcaaggttcctgccggcatgagcgtttcccgcaagattgacctgcgccatttctatgacttgtcccgtgagggcaactaccatgtgcaggccgttgtaaaaatgcccaaccagaaggacatgtttgcttcccagaaatccctgtttgccgtccggacgggaacacccatgtggtcccagaccgtggccattccggccagtgccaagaggtgcactttttccatttgcactattgccgtgcggggaatccagaaattgtatgtgcagacgaaggatccggatacgggagtggcctacaatgccgtgtgcatcggtgactggctggggaccacgcgtccgcagtgcatggtggacggcaaggcgaatgtccatgtcttcttccccactacccccatgctgagcgcgtattcccgcatcaactaccggggaactatggaaaagctgcagtactataaaaaggtggtgggagccccctccatggtctttcttccggacggaagcgtacgtgtgacgggagccgtccattatgatcctaccgtgaaacccaagacggtgccggatgccgctgatgttcccggcatgtgaatccgtcctgtttcgccggatgccacgcaggggaaaaggaaaggcaaacgtactgcttcttccgtaccgggaaaataagatgttccggtattttcctgagctattttcccggctggggagtgtttttcaggatgttttgcacgcttttctgcacaacgctgatgggcagggcgtaattttccgcccggttcactctggcgatgttcatgccgatgagttcccccttgagattgagcagcgggccacccatcagcgtgtaccgggaaggggtgtcatgctggaggaccatagggaaatcatccctgcgtttgctgaacccgccgctgatcaggtcattggaatcctcaggagtgtttcctcccagggcctggcgtctggaacccagcgtgatggtgtaggataaccttttatccttgcgtttgactttcagtgtcactctttctccaacttttttcctggacagaatgggggaaacggcatccagagcagtaacgggcgtgccgtccaccgccagaatctcatctccggccttggctccggcctgggcggcggggccgtccttggtaacttcctgaatggtacagggggtgccgaaaacgacgcccaggtaggcggtgtctccgttcgggatggggcgctgctccgcactaagggttcccagctggggccgtctggacgtacgggtagtggagccgttgctgactaccagggttcccatggcggcatcattgctgacggggccgggagcgtgcagcccggcggcttccactttcactactgcgatgtctgtggacgggtccgagccaatttccctgaactgcccatatttggaagaacctacccggatggtcagatccctgtaggaatggagttccgaggctttggtggcgatgtagccgtccgggctcagcacaatgccgtaaatcacaacatcgtgaccggaaaagaaaactgcgctcaagtcctgaagacgttcgcggatgggctcgatagttttcagaacggctttcccgttgattctctgttcaaaatccaggcttccgttatttccttccgccagagcggggtggaacagggcgaaaaccaggggagacaggcagacgcagaaaggaaatttcatgatggctgagtggagaatggctggctgtcctgttccggtggcggcgtcagggaggtctttccttccgctgtctcctccgtcagagcgtcgaaatccttcatgggcacgtgaagattgtcttccagaccggaaccgactctgctgtgaatgccaatcagctttccatccaggttgaaaagagggccgccggaatcaccgcgaatcaacttgcagtccgtctgaatgacgccgttcttgagggaaaccaccctccccaggcgcaccatcgggccgcgtttccggtccagccccccgccgtgccccagcgcgaacacccagtcccccacacgaggcattttttccgctttttccacgcagggcagttttttgttcaattgggatgtgattttggccatgccggcgtccgaattgctgttttgcgccgtggtttttcccggaaggcgcgttccatccggcaggatgattttgagcgtggttcctttcttgtccacaacgtgggccgctgaaaagaccaggcctttttccgaaaccaggataccggaaccgctgccgttgtttaattcaatgcagaccagggcgggaagcacccggggaagcttttgctgaagctggcgttcaatccgctgcaaatcttctacggattgcggggtggaagtcagaagaccggctccatcagcggactgagccggcgctggcggggccagcagcgccgtgccgcagagaatagcggaaaaacagggattccggagagccggggtcatgattgccggtgattattgtccagagacggaagtttccgtcttctgttgctgatcctcctgtccgccgcccaccagggaatcatggtaatacacgccgataaacaggcctgccagcgtaataagggtgatgaggagctctttcatgccgtcacagcatagaatgtgtattcgcgtctgacgagagaatttcattgataagccgcattttgatgcagttcggcagagcggggatgaatgcggatgagaaaatagccaaaataaaggttgctttttcccgtgataggcgtataaatccctcagcggccgtttccggttcgctggctcatttcaagcggatgtagctcaggggtagagcgcaaccttgccaaggttgatgtcgtgggttcgaatcccatcatccgctccattttttaagaatcccggccggtttgatgcgggaataatgagtttgcctgaacagtgatatttccgtttaattatttgaaggtgcggaaggaggatatggcggtcgtttatttctgcagaggtgaaacaagagccggatatcttgtttgcagcggggccttatgcgctgccccgcctttgttgatctcctccggaaggagaggaattattgcggaagtccgctttcctgaatgacgggagtttcccttggaaggacttttctttttaaaaacagagctgtcaaatatttacggaccggttcatcatagagtttcaggcagagccaggccagcagaatgcttccaatgacgacggccagggctccgggaagtgagtccaggaaggaaagcttttcgtttttcacccacgcatagtacaagtagatgaacgggtaatgcaccatgtacagggggtaggagatgttgcccaggaaacggcatattttatccgtatagggatttgtaattttgccggaagcgccaaagaggaggatgagcgggaaaaataccgcgaagcacgctgtttcatagaggctgttcatccagaaagcattttgtcctcccagccggggaacggccagcagaatggcaagggacagactgcataaccagaaagaatttttgacgttgaacggcttgaacagccggaacaggagcagcccggctgaaaaggagtacaacaggcgcagggagccacccgtccattccgtaccggtcatggagaatccggagcatatgtctccgttaggcccccagaagctgaaggaggcaaggccgtacccggccgagacaaccagtattgccagggagcgtgtagagagtttccggatgaagagggcataaagaaggttgccgatgtattcaaagaacagggaccagctcgggccgttgagcgggtacatttctcccagcccccggatttccatgccgggagaagacggaatgagcagaatattgacgaaggtagcggcgaacagggaaatgaccgctacctgcgatacatcccatacggggcagccctggaaatagaagataagctcgccgatgagcgcccctatcgctaccatgggctgcaggcgtataaggcggcgtttgatgaattccctggtcgtcatcgttttccagcggttgtcataggcgtagccgatgacaaagccggaaagcatgaagaaaaaatcgacggccaggtagccgtggttgatgatttggtccacatggctggtggcgtaggcttcaaagatgtggaaccatacgacgacaatggcggctacgccgcgcaaaccgtcaagaatgtggtagtggtgtttttcactgcctgggggaatgggagaatgctgcgttttcaacatgagagaagctgttgttcgatgctgtttttgttttaatgtgaaaaaccggctgttcatttccgcctttccggtagatgcaggttctccggaggcacagttgttgagctgactaagcaaatacccttcttcccggcagattctttcaacaggcgtttcctgtcttatccgccggcagggcgatgagcggaacgaacggcggttttccggagggaagaatcgcttatggctccggaagatgcaggcaaccgggaaacccgtcaggatggaaccgtttttgtaagtctgccgggaagaacagggtgttgcttgctgcccgtccgatttccggaaacaggagtttcctgcccgcttttctgcgctgaggcgttttttccggaatgggaaaagggcctggcaggggcgaatgctcagcctttgcggtagtttacaagggtttccatatatattccggagatactgccgccgtccatgggggttatgtccttgaatgcagggttgatgggctgcagcacgtattccgtttttcctgtttccgcgtttttcctgcgaatcagttttttcagggtaacgccgcgtccgtcgttgtattccacgatggttcccggtttggggatgggcggggcggtatggcgccgcataattaccagggagccgtccgggatgaggggttccatggatttcccttctacgcggaccacgtattcgtttttacccaggggcctttccatgtaaatggtagacgggacggtgtcgctttccgcaagagagcctgcggcgatgttgccgattatttgcgtactgtattcacgcctggcgtgtccagcatgggacggaaattgtctgaccaggggaaccaggggggagtgcattggccgcagctggcgttcctccgccgcttcgtctgccaaatccgtcagccactggcggagggggacgcctttttcagaggcggcccgttcatatttcctcatgcgctcttccgtgatttccagcacgaggcgattggtctggacaggttcgtcttccggtcgaaccgttttgtattgagacatcagggattggattttcaacatggcgctggcggggaaggggccggagggggagagccagttattcaccgtacctttttccgtaccgcattccatggcaagccagtcacggtttttcccaatggccttcaaccagtgtttcacatccccttttgtcggtgtcatggcttgattatacacgattttcgtgaattgtcgatagaaagaaataaattgaattcgttaaaatgtgttgacgtattaacgaaaatcgttaaaaaggcgctatgaagtacatgcctttagacctttccgtaatgcagccggagccgtttccgcatcccgtgatgatgaggtccgacctgtatcccagaagacagccctcccgggaagaaaagtggggcatttgccccggttccgtctgcggcgcgctgcgggcgctggttcgtcgatgctgggaagaggcggagcggcggaagctggcaatgaacattctttccgtcgccggagcctgcgttttcggactgatggctgtcggcgtgttctggctggctgttgagatggataattccgctttgcaggcttccaagtcttcctgttccataaaaccgtaagccggcccttgtccaaggggggcggaacgcttttttcctgcggagcttgctttcggaaatgaacgatcgcgtttgatgcctcccggtttgttttttccggttgaaacgcctgcggacgcatgaaaggttccggcaggaatgggcgccggatttccagaggggcttttttatccgcagagcaatttgaacgggagagacggagagggctggagcttggatgactgcattatttgccggctgcatcacccgggttccggaaatgccgtccgccaatgccgttcctgtgcgggaatagcggttggtcatgcaggcgggcagtatggcgcccgtttgcgaagaggatgaagctgtggttccggatttctgtccggagggaaccgcatgagatggagcagggatgcttttcctccacgtggccgtttcccgtttatctggcgcggtttgatttcattctggcgtggccgccgggaccggctgttgaaggagtttcctgaggcgcaagcgggcacaggcctgtatggaaatcccctgtggtgtctgtcgtgccgggatgcgaggcggggatgatgcgacccgggtccggggcgcccattattccgggcgttatggcgctggtcgggagactggcggcggaagatgccgccaggaacggcggccttccgcttctggattcattccgggtaaaagatgcgccttttgcggagaaagtgaaaaatgaagaggctttttccgattttgcatgttgagaaataattttatgacagttgatatgtattcattataaatgaattaaaaataatgaagcagaaagtgctaaaaatcttttgcattatagttactataaggaatagcctgaatgaagaaagaagaaggcatggtacgcggccggcgtcctttcccttctttttccggaatccggccatcgccgtttaaaaggcacaccatgaaaaacaacagactttttatcaaatcatcgccatgaccaagagaatgattaaaaatgcttcctacgaaggggaacgtcccctgttcgcttcccgccatcttaggctggaagacgtcattatttatccgggggaatccgccctgaaggaatgttccgacattgaagctgtgcggtgcgagttccgggggaagtaccctttctggcacaatgacgggctgctggtggaacattgcctgttcagggaaggcgcccgggccgccatctggtattcccggaatctgcacatgaaggatacccgcgtggaagcgcccaagatgttccgtgatatggacgggatggttctggagaacgtcgttctgacggatgctctggaatgctgctggcactgccgtaatgcgaagcttcgcggcgtgcaggcggagcatggggattatctgttcatgcacggggagaatatagatgttgacggcttccgcctgaacggaaattactctttccaatattgcaggaatgtggtgatacggaatgcggaaatccattccaaggacgctttctggaatacggaggacgtgacggtgtacgattccgtggtggacggggaatatctgggctggcattccaggaaccttcgtctggtgaattgccgcatttccggcacgcaggcgctgtgctacgcggaaaacctggttctggagaattgcacgctcggagaggatgcggatctctgctttgagtattcctccgtgcatgcggaaatcaaggggcgtgtgcacagcgtcaaaaatccgcgcagcggccgcattgttgcggaagagtacggggatattattctggacgagcattgcaaggctcctgccaattgctccattgaaacggaaaaatcccaatccggagaagccgcatgaagtacgattttgatactgttgttccgcgccgcggcacgaattcctacaagtgggattccatgccccgggaggatattctgcccatgtgggtggcagacatggatttccgtacggctccggcggtgacggacgccatccggaagagggccgagcacggcattttcggttatacacgggttccggattcctattatgaggcggttacaaactggtttgaacgccgccacggctggaagattaatccggaatggatgatttataccacgggggtggttcccgcgctgtctgccgtcatacgggccctgacggtccctggggacaaggtgctggtgcagacgcctgtatataattgctttttttcctccatccgcaataacggatgcgtggcggaaacctgccctctgaaatatgagaacggcagatatgcgctggatgcggaggagctggaacggaaagcctccgatcccgccgtcaagctgatgctcctgtgcaatccccataatccagccgggcgcgtctggacgagggaagaattggaggagatggccgccatttgccggagaaacggcgttttcgtagtggctgacgagattcattgcgaactgacgtatccgggccatccctatacgccgttcgcctccctctccgaggacgccctgcaccattccgtcacctgtatttcccccagcaaggcgtttaatctggcaggcattcagatagccaatatcgtcgcggcggatgaagaagttcggaagaggattgacaaggccatcaacatcaatgaggtgtgtgacgtcaattcttttgccgtagatgccctggaagcggcttataacggaggggaggactggttggaggaactgaagctctacctttacgggaattacgagattgtccgggatatgctggcagaacgtctgccgcagcttcgtgtggtgccgttggagggaacgtacctggtctggatagattgttccgctctggggcttccctccgcagagattgtccgcctgctggaagaggaggggcgggtgctcgtcaacggcggggaaatgtacggggaaacggcggggtgcttcattcgcctgaacgtcgcctgtcccaggaagctgctgcttgaggggctggaaagaatcatccgcacgctgtgcggcctcatttccggaacacggacgtgcccgtcgggtcctgcaggctcttaacagggagaacggttattaatcatcaacaatcaagttgccatggaaaataagatgacgagaagaacatggctccagtcttccaccgcagccctggcatgcctggctttgccggagtatgccctgggcgcgattgcggagaagggtggagcttccagggtctggatgacgaaagaaatttctccggaggctctcgtgaggatttacgaggctctggggcgtccggccgggggaaaggtagctgtcaagatcagcaccggggagccgggaggccgcaattttctgagtccggccttaatcaaagacctggtgcgccgggtgaacggcaccatcgtggaatgcaatacggcttacggaggcaaacgctcccggacggaggaccatttgcaggctgcgaaggatcacggtttttccgatattgcgcgggtggatatcatggatgcggaaggggagttcactatcccggtgagggacaggaagcacctggaatacgatatcgtgggggatcatttaaagaattatgatttcatggtcaatctggcccatttcaaagggcatgccatgggcggcttcggcggtgtgatcaagaaccagtccatcggtgttgcctcggcagccgggaaggcgtacatccattccgccggaaagacgcgggatgtttcctccgtgtggaacaatctggccagtcaggatgatttcctggagtccatggcggcttccgcgcaggcggtggcggattacttcggggacagaattttgtacatcaatgtgatgaataatctgtccattgactgtgattgcgattcccacccccatgcgccggaaatgaaggacatcggtattctggcctcccttgatccggttgctcttgaccaggcctgcctggatctcgtttacgccgtcaggccgtccgaagggaatgacaacaggcccctggtggagcgtattgaaagccgccatgggcggcatacggtagagtatgccgagaagataggtcttggcagcaggaagtatgaactgaaagagctgaaaccgcagcaggccgtttaatcggcaatttcctttttagcatcaaaaaacaatagaaaaaactgttatggaaaaaatcattttgaacaatggcgttacgatgcctgtcctggggtttggcgtttttcagattcccgacgctaaggagtgcgaacgctgcgtgctggatgcgattgaggtcggctaccgttctattgataccgcgcagatttacggcaatgaggaagccgtaggccgcgcagtggagaagagcggtgttccgcgggaagaattgttcctaaccacgaaggtgtggatttccaacggcgggtatgagaaggcgaaggcgtccattgacgaatccctgcgcaagttgcgtacggattatctggatctgctgctcatccaccagcctttcaacgattactacggcacttaccgggccatggaagaagcgaaccgggccggaaaggtccgtgccatcggcgtaagcaatttttatccggaccgctttgtggatctggcggagttctgcgagatcaggcccgccgtcaaccaggtggaaacgcatgtgttcaaccagcagaaaaaggcccgtgaagtgatggaaaagtacggtaccagaatagaatcctggggaccttttgcggaaggccgcaatggatttttcacgaatccggtattgaagagcatcggcgagaagtacggcaagaccccggcgcaaacagccctgaggttcctgattcagcgtggaattatcgccattcctaagacgacccgccgggaaaggatggtggagaatttcaacgtctttgattttactctttcccaggaggatatggaggctatcgccaggcttgaccggggagagagccttttcctgtgccaccaggatccggaatcggttttgtacctgatcaattacgggaagtaatcattcacattagatattggacatatgaccgttatttcattgacaaggatttgtctggctttctccgcaagcctttgctgcgcagggagcttatccgctgaacatcatcataccgacactaacaaaatcatgaccgaaaaactgaatgtaacgcaggaatgggataaagtgtttcctaaaagcgacaaggtaacccaccgcaaggtaagtttccgcaaccgctatggcattacgctggctgcggatttgtatatgccacggaatgtcaacgggaaattgccggctattgctgtttccggtcctttcggcgccgtgaaggaacaatctgcgggcctttatgcccagacgatggccgaacgcggttttctgacgattgcgtttgatccctcgtatacgggagaaagcggcggatttccccgctatgtcgcttccccggatatcaatacggaggatttctgcgccgccgtcgattacctctctacccgtgatgacgtggattcggaacgtatcggaatcattggcatttgcggctggggcggcatggcggtcaatgcggcggctatcgacacccgcatcaaggctgcggtaacgtccacgatgtacgatatgagccgcgtgaacgcgaacggctatttcgacgcgatggacgccaacgcccgttatgagcttcgcaaacaactgaatgcccggcgcacggatgatgcgaagaacggttcttatgctctcgcggggggcgtgcctgattttctgcccgcggatgcgcccggatttatgaaagattattacgattattataagacgccccgcggctatcacaagcgttcgctcaattcaaatggcggatggaacgttacctcggcgctttctttcatcaatatgccccttctggcgtacagcggtgaaatccgcagcgccgtgctcatgattcacggagaaaaagcccattcacgttatttcagcgaggacgccttcaagaagttgaagggggataacaaggagctgatgatcattcccggcgcgagccatgtggatctttatgacaatcaagccggcgttattcctttcgaaaaaatcgaacagttctttttgaagtatctgaaataaggcgattctgcggctgaatttggagaagaaagatggaacgtaatgaaacgcaaggattttctcaaaataacgtccggttttgccttatccctgtttcccggggatgggccggggagggttcttctttgcttcttgatggtccggggtcttcttccggggcaccgaagaagggttttcctggggaatcccggcgccttggaggtctggaagtgtcccccatcgggctgggatgcctgccgatggtgggttattacggcggcaagtatgataaacaggagatgattgccctgatacgccgggcttttgacaaaggagttactttttttgatacggcggaagtgtatgggccttataccagtgaggaatgggtgggtgaagctctcgcccctgtccgcgaccaggtcaggataggtaccaaattcggttttggagtgaaggaaggccgcccttcttccctgaacagcaggcccgaccatatccggcgtgcagtggaaggttccttgagacgtttgcgtaccgaccatattgacctgctttaccagcaccgggtggatccggacgttcccatggaagaagtggcaggtacggtgaaggaactgatgcgggaaggaaaagtgctgcatttcggcctgtccgaagccggcgcccgttccatcaggaaggcccatgccgtgtgtccggtgagcgccgttcagagcgaatacgctatctggtggcgggaaccggagacgaagatttttcccacgttggaagaattgggcatcggttttgttccgtattgtccgctgggacgcgcttttctggcaggagccgtttgggaggacagccgttttcaaaagccggaccgccgcgccactttgccccggtttacgccggaagccctcagattcaacatgccgctggctgttcttgtccgggaatgggcggaaagcaggggcatgactccggcccagttcgccctgtcctggatgctttcccggaaaccgtggattgcgcctgttcccggaacaaccaatccagcccatctggatgattttctgggaggggcttccgttcgcctgtccgaaccggaactcaaggaatttgaccttgcctgttccaggctccccctgatggggcaccgggcggatccatttacggagagccagatagacaagtagttttgccgatgcgtttcccttccgttcaaatgccatagagttgtttgcggcgaggggaagatattaagctgtttttaagaaagagacatatgatactgattttcggagcattgctggcggtttacgttttctgccgcgctattttgcctctgaagctgaaatggggctggaagcttctgcttgccgccctgctggcggtggcggcattcaaattccacttgctgcatttgtttggaggccccatgtttttctccccggttttgccggaagacgttctgctggcggccgcgtggctgttctccgttcttttcctgttctttttcctgctgctggcggcggatgtggcgcgggcgctgtatctgctggttttgttctgcctgcggaggaacaggacggagaggttccgcgtcattggcaaccgggtgaatgttgttttgctggttctttccgccgtgctggcaactgtgggcatgatcggaggcaccagagtgccccaggtgaaggaggaaacgattgccgtgaaccgcctcccggagggggcggatggattgaaggtcgccgtgctggcggatcttcatgcggacggcattacaagggaggaccgcattcggaagattgtggagcgcacgaacgccctgaatccggacatcgtcgtgattgccggagatttcgtggacgggtcggtatccgagcatggcggcgatttgaggcctcttgcggatttgaaggccagatacggggtgttcggcgtgccgggcaatcatgagtattactccggttatgaggagtggatggagttcctgcccactctgggcattcgtatgcttcttaatgaacacgcgccggcgggaggggaggccgtggtattggccggtgtgacggatcctgtggccggcatcatggggaaggaggagccggatataagcaaggcgttgaaggatgccccggaaaagggagtgcgcatccttgtttcccaccagccgcggctggcccgggaagcggctgcgcacggcgtggatcttcaagtgtccggccatacgcacggaggcatgattgccggcgtggaccggctggtggcgcgttttaacgagggattcgtctccgggctgtacacggtgggtaatatgaagctgtacgtttccaatggggcggggatttggaacggctttcccatccgcatcggcgttccatcggaaattgttctgactcggcttcggaaagaataacatatattgataaagcagtttaggaagtgatgcgggcaggattgccggaattgttgaaaaaatattgacttatagttactctaatgtttagacagaaataaggaacaaggtcaggcaagggaaatgccggatgaaaccgttttttctggacgccttttgcctctccttttaaccggataaaaatacatgaaaacaatatcaatgatatgcacgctggccgcggccctgatgacaggagccggatgtttgggacaggaacaacccaaggtttccgcggaaccttccagggtcctcattgcctattattcatggggaggcaatacgaagtacgccgctgcgcaaattcagagggcgacgggaggaacgctgtttgaaatcaagccggtcaagccttatccctccgaataccgggaatgcaccgtgcaggccaggaaggagattcaggaaggggttcggccggaactggccgccaaagtagaggatatgggcaagtatgatgtgattttcatcggcagccccaactggtggagcaccattgcgcctccggtcgcgtctttcctggcaagttacgacctttccggcaagacggtgattccatttgtgacgcatgggggcggcggcatggcgcgctgtgcggacgaggttcggaagctgtgtcccaagtccaccgttctcaagggaggcgcttttgccggggaaggaatccggacgacgagggccgcgcttgtcaagtgggtcaatgagacgatttccatcaataaataatgattttatgaaacgaaccatcgcgggaatggctttttcccttgcctgtctgatgaacctttcagaagcccaaaccataaatcacgataaagtggaaatggagaatggcaaaaatacgggcatgtgcgacaagttaccgatgaagcctgatggtatcgtccgtctctcaaaaatagaagtgcattctgaatatttggaggaatatgtgaaatgcgccatcgaagtgggggaaatctccctgcgcacggaaccgggcgtgttgaccatgtacgctgttgctgaaaaggacaatgcttgcagaattacgattcttgaaacttacgccagccaaaaggcatataagtcgcacatcgcatcggcccattttcagaaatacaagcaggaaacgttacacatggttaaggcattggttttatccgaccagacgccactgaatcctctaaacagtattactaatattattaaataatacaataatgaataagattattttatttctttcaattagttttttcataacaaatgctatggcgcaggaaaagatagtacagacggcgggacgcactcagttaggagaatttgctcccaaattttcggaacttaacgatgatgtccttttcggtgaagtatggagccggactgacaagctcggtctgcgtgatcgcagtttggtaaccatcacctccctcattagtcagggcattaccgacaattcgctcgttttccatcttcagtcggcaaagaagaatggagttacccgtaccgagattgcagaaatcatcacccacatcggtttttatgccggttggccgaaagcatgggcggcatttaatctggccaaagacgtatgggcggaagatgcggctggcgaagacgccaaagccgctttccaacgcgaaatgattttccctttaggcgagccgaatacggcatatgccaagtatttcacaggcaacagctatcttgcacccgtttcacgcgaacaagtgaatatctccaatgtaacttttgaaccccgttgccgcaataactggcatattcacaaagcgacgaaaggcggcgggcagatgcttatcggtgtggccggacgcggctggtatcaggaagaaggaaagcctgctgtggaaattcttcctggaacagtcatccatattcccgccaacgtgaagcactggcacggggctgcctccgacagatggttctcccacttggctattgaggttcccggtgagaatgcatccaatgaatggctcgagccggtgacggatgaggagtatgccaaggccgtgaaataatgtggatacttccatgtgaaacaattacagcgcaagctgtcgtgctggcgctgtaattgtttgatacaaaattattttgattattccgcggcaccgttgctttcattcgcaatataataggatttgccggaggcgcccatgtattcaggaatagtctcggatagcacaggttaagacccgtattcgacgaaataatatgaaaaatatattgattatcagcggccatacaaaccttgccgcatctgtagccaataagacaatccttgaaaccttgaacgaacggctgccggaagctgaaatcgtaaagcttgacgaactttatcccgattttaagatcgacgtggaagccgaacaacagaaattgctgcgggcagacatcattgtattgcaattccctctcttctggtactccgcaccctccatattggaacgctggatggaagaaaccttccgccacggcttttcacacggcagtaccggagacaagctcaaggacaagaaactcattctctctttcacaacgggagcacccgaaacgctgtatagccgtgaaggggccatgggctacgcgattgatgaatttctgccatgctacaaagctgtctgccgactgactcaaatggaatactgcggcagtgtttatacctgcggcataagttacggcaatcgtacgacaccggaacttatcgagcagcaaaagggagcatcggtggaacacgctgaacgtcttatccggttacttgaagcgctctgatgtttgaataatttcgacgctatggccttcaattgccctctatccgatgactgcatgaatttcatgtatgcggaggcggcaggaagcaaataagaacgcagagcggccgggattcctcattggaaatcccggccgacgtctgttgaggatttaagggagggtttattcctcaggcgcgatgttcggctcgctggcgctgatgtagttcagcggattgcagctgtccggcctgcggttgtctaaaagatcctgataaaattttttcttgtatttcaacacttccatttgttttttcaggattcggagctgttcccggagacttttctcctgcttgaagatcagttcggcgcgctccggaatggtggaatccccttcctggcacaggtcgatgtagtgcttgacgccttcaatcgggaggcccgtcatccggaggcagtggaccaggcggagccaccccagggtgtagtcggaaaacatacgggcattccctccgctgcggtccacgtccgggattaatccggcgttttcgtaataccggatggtgtaggctgacatttccatcatttccgcaacctgcttgacagtgtatctgggggtgcggtcataagaagggcggtaggtgccggatggatttttctgtttaatcatcgtgtgactgatagcttacagttactccaatatacgaggcgttgccggatgacaagttttttactgtgcttcacgggaataacgtatttaaaggccaaggaaaacggcggtaactccattccgtggaggaaggaccgggctgtgcgtcggaatatcgggggaaggggggcaaatgagttgactggcttttcctccccgttacaatgaagcccgctccggggacggagcctgtaatgatgattattgcctccctttccgattccgcccgttacgaaatgttgaatcccctgttcaggagagctttcgattttatcagggagattgctccggcaaccctggaaaccggccgccatgtcctggaggaagacgccctgaccgtgatggtgaatgaaccggtgatgaagaagcgggagaacgcccgcatggaagtgcatgaccggtttattgacattcacgtgcccctttcccgggaagagggattcatgtggaaagagcgcgcggcgctggaaaaaccttccgaaccgtttaacagggaaaaggacgcgcagcattatgatgatgctccggacacctcttttgtcgtgaaaccggggcagttcgccatttttttcccggaggatgcgcatgccggctgcattggggaaggaaagattctgaaactggtgattaaagtcagaacggcctgaacctcattccggaaaaacagtccggaatggagaacaggccgtttcttcaatttgcgggcgggagttgcgttattttccgtcttccttccgggcgtcctgtaaagcgttttccggaatccatacggccacattgccgccgtggacaagaaaccggccgttgccttccccgtcaatggagacggtttcctccacgttgccggtggcttccttccaagtttcccctgcgtgctgcttgcccacgttcatgactttgtctccatcctctccattggaaatgagcacagccacgccggaatgcgggtgctcttcatctcccacacgggtgaagccgatggtgttcgggtggtcaaagtagtaattttgttccccgaaagcatggtttttacggatttccagcagattgtcgatgatggcgcggtgcatgggcgggttgccgctcacaccgtaatagtccccgtagaagatgcagggataaccttccttcatgagcaggatgagcgcataggcggagggtttgaaccagtcttccacagctgattccagggaactgccccactgggaatcatggttgtccacaaaggtaacggccagcgtagggtggttctgaaccagggttccgtccagaattttggaaaggtcgtaatcgcggccctgcttggaggcctggtacatgttgtagtgcagggggacgtcaaacaggtccactttgtagcgttcctccttgaggtaatcgtccagggattccagatcctgtttccagtattcacccacggcgtagaagtctgctcccctttccttgcggacggctgccaggaatttcctgatgaattcgtcattgatatgcttgatggcatccagcctcatgccgtccagatccagttcccgggatacccatattccccatctttccatttctttcaccacttccgggtggttgaagtccagattggcgaacataaggtagtcgtagttgccgttttcttcatccacgccttcgctccagcttttgccgtctcccataatcttgaaaatggaggttttttccgtgcgtgcgtcatagtccgttccggtgaagtggtaccagtgccatttgaagtcggaatatttgtttccgcggccgggaaagttgaagccggtccagccttcaatctcgtaggcatccgtaatttccttgtcgcggttctgctggtccacttccttggccatgaatttttccgtatagtctgcccctgctttgtggttcatgacggcatccagataaacgcctacatggtgttcgtgaagagccttgatggcctcctggagttcctgcctggtgccgtatttggtgcggacggtgtttttctggtcgaattcccccaggtcaaaaagatcataggtgccgtatcctacgtcattttgttccttccctttgcaggctggaggaatccagacggccgtaacacccatttcctccaggtggggggcgtcttccttcaacttgttccaaaactgtccgtcgttgggcagattccactcaaaatactgcatcatgattccgtttttcatttgatctgattccttgtcataccgttcgggttgtcgtgcttccaggggctgtccggtggaaaaagcggttttcccgggcgaggttccggatgatgaatccatacgaagcccccaacagaatagagtcctgaaagtacggcgcgttaggcatactgccggtcttatgtcctgcaaaaatgccagcggcaaaacggtaggcgggaagggtttttctccgaaggatgggaaaaagcggtttcactcccccctgccgcaccccggaaagaatgggccgggaacgagggttcgtgtaagtaagacaggtgggaagaaagattatgcctttcccgtgccgggaaccaggtagtgcctgtttttcagccggtagtatttcaggaatcggcggatgaagagcagggtgacgataaaggaaagcacgtctgccagaggaagggatgcccagactccgtcctgtccccagaaacggggcaggaccagcaggaacggcaggaggaagagcatctggcgcgtcagggacaggaagattgccagacgggcttttccaatggcctggaagaagttcccgatgatgatctggctgccgatgagcggaaaggccagcacgcagatgatcagaccgttggccgccaggctgatgagcgaggcgtcatccgtgaaaagcccggcaatgccgcggggaaagaagacgcaggccaggaatcccagcgtggtgaaggatgtccctgccagaactccgtatttgagggtgagcagaacgcggcccggcttcatggctccgtggttgtagccgatgatgggctgcattccctgagtgaggccgatgacgagcatggcgaacagaataagaatgcggttgatgatgccgtaggccccgatggccaggtcccccccgtgatccgcaagctgcctgttgatggcgacggtgaccgcgctgccgcagacgtttaccaggcagggagccatcccgatggacaggatgccggtgacgatggtcttgcgcagctgccagatgccgcggcggaagtggaccgtgctagccgcatcggaaaagtgtaacagcacgcgcaccatgccgacgacctgggcgagaagggtggccacggctgctccggtaatgccccatttgaaccagaagatgaagatgggagccaggatgatgttgattcctacggaaagaagggtggagcccatggcttttttagggtagccggtagctctcatcacatgattgaggttgaagaagacgtacgtgacgggcaggcccagcaaggtaataagcatgaagtcgtacgcataggtgagggtttgcccgctggcgccgaaggcggtcaggatttccgtaaggaaaagaagcgtgggaatcaccagcaccacagcggcaatcagactcatgatgaggacgttgccaagcgtacgctcagttccttcctggtcttttcttcccagccggatggagctgatggccgccccgccgatgcctaccagcgtgcccagggcgaaagtcaggttcatgatggggaaggtgacggccaggccggacagggccagaggccccacgccgtgaccgatgaacacgctgtcaatgatgttgtacagggagtataccaccatgccggcgatggagggcagggagtactggatcagcagacgccatacggatgcgttttccaattctgcgatgttgcgtgactgggctgccatggacgttcctcctttcaaaacaggtggcaaactataaaaacgcacggatgggttgtcaagctgtccacctgtccggaaaacggcctttttcccccagtttcagagagagggctgtttttgattgactgtggaagcttttgggggttgagtcctttccgcctttttcagaagcatgccatgaccatgtccgttttctctttcctgcgtcttgtctccgtttgcggcgccgctcttatgggttcttcctgtctgcccatgtttggcgccgggcaggtgctggcgggaagcagcctcgcggaaggtctgctgccctcttcctctctggatcttgtgtggagaggagacatccgttcttttccctcttccggtttgaggacgccccgcgggttcaaagtttctcccgcggattcttattccctgctgatggaagcgcgcccggggattgccggagagtgggcctgctatcatgaccgcagtaattactactgggcttttgtagccggaaagaaggaggaggaagcggggctttacgccgtgcgccgcggcgtggccgtaagcggcatttccggagaaattgaagatgcccccgccgtgcaggatgctcagccattctccgccatgtaagcacaggttctggtctttttgcaaaaaatgctgccggaaccccgttttccggcaagttggacacgataggtttgacaggcagctgttattgcgggcgtattatgaaccgcatgaagttccttttattatcgtttgcatgggtgtgcatggcttgcgccggagcatgggggcaggatacggccccgtctttcccggccaatggggccaattacaggctgtttccggcggaccggcctccgctggttcccaaaccccagcagctgcgctgggacgacagggccattcccgtgcagtccgtacgcattttggctccgtctccgtccaggacttcctatccggaacagatgaagttcattgtttccgaattgaaatcttttctggcggagcaccgcgtgaaggtggctccggacgggacttttgccgttaaattcgtcaagggggatgtgaaagccggcacggaaaattccaagctgaaggaggaggcttattccctccgtgtaactcccggcggcgcactcattacggcgatggataccagaggattctattacggcatgaaaacgctggagcagcttcttttgcgccgcggcgggacgacgaccattgccgcctgcgatatcgtggactggccggattttgaaatccgcggattcatgaacgatgtgggacgcaattacatgccgctacctctgattgcacgggagctggattccatggcgcagctcaagctgaatgtttaccacttccattttacggagaaccccggctggcggctggaatccaaaatttatccggagctgaacgcccccgaaaattatacgcgcatgcctggcaagttttacacgcagaaggagtttaagcagctggtggagtactgccgcctgcgcaatatcctgctgattccggagatggatatgccggggcacagccagatgttccgcaaggcgctcaacgtgaagatgagcgatgaaaaagccaccaaagccctggtggccctgatcaaggagttgtgttccctggttcccaaggagaaaatgcccatcatccacattggcacggacgaggtgcgcggcaaggatgagcaggtgaacaatgagattcttaaggagtacatccatgcagtggagtcctgcggccgcattcccatgagatggcagcccggcctgacgccgaagggctataacggctccatccagcagttatggtccggccgccagaaccgtggcgcatggcctaccgacggagcgaagtatgttgattccctggagacttacctgaaccaccttgatccgtttgaaacggccatgaccatgtatttccgccgggcatgcccgtttcggaatgcggaaggactgggcatgatgctgtgttctttcccggacctggaaattacggatccgcgcaaccaggttcttcagacgcccgtttacgccggcatggcgttcgtttccgaacctttgtggaataatccccatgagaaggtgctgggagaccccaaccaggacgaatatatgaagtatttttccaatctgcccgtgcagggggatcctctgctgaaggggtttgcggattacgagaaccgcgtgctcgccatccgggaccgttttttcgtggataaggagtttaattacgtacggcaggcgaatattccctggaaattgctggggcctattcccaacggcggtaagacggaaaaggaattcgctccggaggaggacaacaaggcagggaagatgagggattcctacgagattgacggcgtcacctatgagtggtccggagacgattacacgggggccaccatcattttcaagcattactgcgattttccgacgctgttcaatggcgcaaagatgggagcttatccccacaaaaaccacacttattacgcgcagacctggatttattcccccaaggcgcagacggtgcctttctggatcagcggacatacctgggccacgtccgattggcgcaacggtccggcgagcgttcccggcaagtggtttcatgcggatcccaaattttttgtgaacggccgggagattgcccccccgcaatggaaaaagccgcgtaacagcggcgtgatggtggatgaaaactaccatttccgggagccttccatggttcctcttaggaagggttggaaccgcgtgctggtaaagagccccagcaacaattccgcgcgtcggtggatgttcacattcgttccggtgctggtgaaccccaagacgcccggctgcaatgtgaaggagtatcccggcctcaaattttccacacgtccggaatggaaaatcccgtgatgagcatccggagctggaatgagccggttgcagtatccgccatcatcattaaaaaagaagccgcgcttctggcaaaagcgcggcttctgattgcatgcaaaggacgcgaatacgaaattaagccctccccggcggcgcgtcatcagagcggcaagttccggcgggctgagggaaaccatgggcggttccggcacgggagcacgggaagaaccgcttcattgtagtttcaatgaaagccgggtaattctgtattgttacagtattttccagggaatattttccaatagttcgtcaaagccgagccccgtgcctccgggaacagctgcctgagggttcatgccgcccatctggtcaataaaggggtccggctcaaacaggagatgagtgcagaggccgcagaggggaatttccgtgggaaggaagttgcggtaatactccgccgcctggtaaacggcccagagctgccctacggggtgatccatgacggtggtgaagacgggaggctcgtaaaggtattccggcgttgcttcccgcgcgggtttgacgatgcggatgatgggcaggtctgaggaaatagccggctggtgttccacgtccgaacccatgtccagggccagaggcatgccggcgtccaccagacgttcccagctctggatggagaaggggcacgggtcttctatgaaatctatcctggttttcagatggtggggcagggatttccagaatttcagggcatcgttttcattcaggcatccgttgaaatccagccgccagcgccaggaggggaccatggatgccagcatcgtcagccgttccagggaggcggccagattggcgctggccttgatttttcctgccttgaatcccttggattccatgatgcgaatggtggcggggctgacgcaggagggcagcgtggcgtggctttccgggatgtgaagaccgtcaaacaggctgacgcccctcgcgcgtgcttctccgtccgttcgggcgcattccgcggcgcggatgcccaaaggcagagggcggcccttcctgagcgcgtccaattcctcctgcagggtggcgtctcccagttccggccacggctggatgcagccgtacccgccttcatccgttttaataagggctcccttcctgcacacttccgcggctctggcgttcagagggccgcaggctgttaaagaatattcatggtaaaacacaactttaattcaaacaacctttccatcttttgtcacgatgaaaaaaggttttcattggattttggagggtgaaacgtctaagctctgcgtcatgtacagaacattggtgttcggagcggacggccgggtgggaagccatctggcagcatatctggaagaacatggcctggaggtggtgaagtgcggacgggacttttgtgatttgaaggatttaagcgctttgaaacgtgttctgctttcttccggagcctcacatgtggtgaattgcgccgctgtaagcggattggaagcctgcctggatgatccggagacggcccatcgcgtcaacgccatggctccggagatgatggcgcgcatttgccgcctggagggtatgcgctttatccatttgagtacggactatgtgctggacggcaggagagaaggcctgaaaacggaggaggggaagtgccgccccgtgaatgtgtacggggagtccaagctggaggcggaattccgtgtgcgggaggagatgccggatgctctggtggcccgcgtttcctgggtattcggcaatccgggacggccctcattcttggagatggtgctgcggcgggcaatgaaaagggagcccctggccgctgtggcggacaaatggtccatgcccacatgggtggaagatttgtgcgtctggctccgttttctggcttatgagagcggggcttccggcgtgctgcatctgtgccagtccggagagcctgtttcctggcacagttatgccataaccgtactgaaatgcgccgtgaagtacgggttgctgccttctttgccgcccgtggcggaacaaaagctcgacgaacaggccggtttcagggatgctcggccccggcataccgccatgtcctgcgaacggctctcttctctgatgaagaagcccgtgagggcgtatgaagaggccatcgatatggccgtggcccgctatgccgcagatccaacctttctctccagcatttcatgaacgatttccgcaattcccgtgattcccgtcccaggcccgtttaccgggaccgccgttcccggccgggccgtccgcgcacggctcccaaaaagaacctttttgccaacaagtcgccggaagggagcgagcaatggctcaagccctgggtggagctgaagtatttcacatacaatccggccgtgttcccccgcatgctcggctccgtaagcggggaaatagcgccgggtagcctggtaaacgtctatgacaagaacggtgaattgttcggcgccggattctggaatgagtacagccgcacgcctctgcgcatggtgcaccacgggaaggacgcttttgccgaacgggatttggatgccgcgctggaacgcgccgtgaagctgcgccgggaagttctgcgcctggatgagaccacgaatgcgtaccgtgtgctgcacggagattccgacggcctgggcggcctggtggtggaccgttacgcggacgtgctgagcctggaggtgagtactctggccgtctggcagaggctggaccgctggctgcccctgctgcaccgtctgtgcgggacaaagcgccatgtggtgcaggtggatgagggcattgcccgcatggagggtatccgggcggaggaggcgccggcatccccggctcccgtcaggctggtgaagattgtggaaaacggcatcacctatgaagtggacttcgcccaggggcacaagacgggctttttctgtgaccagcgggacaaccgcctcaagttcgcctccctggtgaagggggctacggtgctggacctgtgctgctacagcggcggcttttccattgccgccaagatgctgggcggagcggcggaggtaacggctgtggatttggatgagaaagccgtcgccatggctaagagaaacggaaatatcaaccgtcagcgcattgacttcgtgcatgcggatgcctttgtctatgcgcgccagatggtgcgcaacggccgcctgtttgacgccgtgctgctggacccgcccaaattcatcatcggcagggacggatatgaagagggtatcaagaaataccatgacctcaatatgttggggctgcaatgcgtgcgccccggcgggctgtttgtcacctgttcctgttccgggctgctttcccccgcggagtttgagcataccgtcatcaaggccgcccagcggcaggggcgcaagctccagattatggcgatgaccggccccggctgggaccaccctttcctgagcacttatccggagggccgttatctgaaggttctgtgggcgattgccctgtagctggaggttgaggcccgggatgcatttcgaaaaaacctttcaggcgtgttgacgttttttgcccctctctgctttcgtggtggggaatatggcaaaacaagtattgcagcggcttagttttacggccggggagctgaccccgtggctggccgggcgcgtcgacctggaccccgtgtcccgcggtgcctcccggctgatcaattttctggtcagccccttcggcggtctccggcgcaggccgggaacacgcctggtcgcccgcgcgggatgccgggagggcatagtgaggctggtttccttcaagtactccacgggcgtgcagtttatgctggaagtagggcgcggttatatccggtattttaagaatggcgctcctctgacggatgcggaaggcggggcgcaggaaacgcttactccgtggaagacggatgaacaggtaagcaacctccggatgcagcagctgaatgacgtgatttactgcgtggaaccttctacgccgcctatgacgctggcccgctacgcagacgatgactggcggctggaagctttggagttttccggcattccttatgagagttccctgctgaatgccgtgcggctggaatgccgcatggtgcgggagggaagagacaacaggctgctggcgacggcggacgatgatgtattcactccggaaatggagggaaaggagtttctgcgcattaccaggaaatatggagaaaccgtggcggagggaacccagatgcctttttaccatttaacgactctggaccgggacctttacaagggagaaactttttccatgaaccgggaggatggctggcggcaggcttatacctgcatccgcgatttcagccgggaaagcgactacctgaaaggagtggaccgcccggagcgttacacggccttttttgaaaaaggggccgatgccagtacccgcgtttatgtcaatggcgcgtggacgttggagacgacggggacctgggatgcggaatgggaaatttgccggggatatccggacggctccaattaccttcccaaccgtccggaactggtgtggcattccgtgaagagcttccagcagagggaggggttccggaataatttcaccttgagcggcaatgaggaggaaatgtcctattacaaaatccgccttatggcgtacaagggcgggacctctgcgggaacgcccgtattccgtgccgctgccggctccttcaatcatgaagtggtggtggaggaatatgtttccccgcgcagcgcctatcttgcgaacgcccttcatctgtcctatcatccgctgagtgactgtgataccaatgactggtcctttggtgcgttcggggtccggaacggttatccgtgcacggtagagttccatcaggggcggctgtggttcggtggcacgcctgggcagccccagacgctgtgggccagcagggtggatgatttttccgcgtttacgcccggcattccggcggattcccccatgattttgaccatggcggcttcccagcagaaccgcatttcctggatagcttccctccgggggctgatgatcggcaccagcgagggggaatggcgtctgtctgccaccaattcagaagggttgaatgcctctaacgccggatttgagcgtcattccggagtgggctccgcttccctggatgccctgtctgtagaaaacagccttctttttgtgcagcagggtgggatgaaggtccgggaattattttattctctggaggctgacggctaccagacaagggatgtgagcctattgtccgaccatctgctggcggagggaattgtggactggactgtgcagagaagcacggcgttccatgtctggtgcgtgctgggtgacggcagcgccgtatgcatgacactgaaccgggagcagaatgtggtggcgtggcatgcgcaccgtctggaacacggtcgtattttgtccgtagcgtccttgcgcggttcccgcaacacaccggatgaggaagtatggtttgccgtggcgcgcggggaaggggatgaggcctgcattacggtggaatgcatggcggacgggaatgcctgcctggatgcctgcacggaggctgtcgtgaaggggggaacgctgtccggcctgagccatttggcgggatgcggcgcctttctggtgggcggggacggcgcatgcatggacatcagcgttgacggagccgggaatgccgcctgtcccggaaggggggatggggaaacagtatccgtaggcctggccgctccggcggaagtaaggacgatgcccctggaaacgcttgagacgctgggttgctttaaaaagcaactcggtgcgcgcgtcctgcttcatgaaagcaccctgaaattccgctacggaacgggaactccggaggcatggaaggatttccagcccggcaggtacagtgtttccgaaccttactccggctatgtgcggatgattcacaactatggtatggatgagcagtcttcctttgccctccgtgtggagactccggctccatttaaccttctggccctggtgctggatgtggaattataggcgcaggagtgcgtttacggctgttcagccgcctcttcatgggaaagcatgtgtacaatgaccttgatgccgtgtttttccccagccgccttcgccagggaacgaatggcggaggccgtcattccattgcggccgatgatgcgtgccacgtccgttttttccagaatcaggcggaagcggacggcgtctccctgcggggattccgcaacgcgcaattctgcctgttccgggtgttgcacgaattgcagggcgatcaattgcaggtactggcggatttgttctacggcaggatgcatgaagggaaatatgggttattttcatgaaccatactataaagccgcctgattgaaaagatgcaattccagacattccctgaaaaagaaagtcgccccggccgtaaaacggccggggcgccccaactaccctatgaaactggatcggttaagatccagagagcttttttaacgagcgctcacctgctcgaggcgcaatatagtggaggaaaaggggatacacaagtattttttcattggaacgatgtttttgttcaatggaaatagcatcgtatttttatttcattttgacaatatcgggaccggaggaatggttattgttattgtcatgaaatcatcttccgggaagcagttcatacgtgaaccccttcaggtattccgtttccggaatattcaataaaaccggatgatccgctctttggccgtgttgctgcatcagacgcagggtggccggagcatcaatggcggcgtcaagcacgctctcccggaacaggtccgctccggcgtggtgggaacagcagaaggtggaaaggatgcctcccggagccagaagcttcatggcgcggaggtggatttccttatatccgcgcatggcgtcatgcacggattttttgtttctggtaaaagagggcggatccaggataattaaatcccatttgtgttctcctccgtcccggacaagggccgcttcctttttcaggaagtcaaacgcgttatctgtgacacactgcacggagactccgttcaggcgggcgttccgcgctacggcgtccatagcatcctgggaaacgtccacggccgttacctccgaggcaccggcaagggcgcaggccagggcgaaaccgccctgattgcagaagcagtccagcacgcggcgtccgcgggcgaagcgagccacggcggcataattatcaagctggtccaaatacaggccggttttctgtcccgtctgaaggtcaatcatgaattgcacgctgccgctgcgtgcggcaaaaggttccggttgctgtcctcgtgccacccggacggagggggaaataccttctgccgccagcatgggtgaatcattcctgacaataatcccgcggggagaaagaaggtcttccaaaacattcaggatgatggggaggcggcattccatggcgatcgtcagcgtctggacgaccagataatccgcgtaacggtccacaatgaggccgggaagcccgtcggattcgctccaaacgagccgggtgagagtttcttctggaagccggcggcgcagttctactgcctggctgatgcgcctggaaaagaaatctccgttcagttcctgtttgcggcgggaaaagcgcctggcgacgatctgggaatggggattgaacatggcggaacccagaaagcggtccttgaaatccttcagggccacgacgtcccccggctgcggattgccgaaaattttgcgcacttctgtgccgtaaacccagtcgtgcccttgaaaaatgcgtgctcttggagaaataatcaaacctgccatgtcaggaaaggcaatacatgatcggggtggaaagttcaagggtaatgcgggcggctcccagaaaggccgtgggaagggtggaggcctccgttccctgggatttttcgcgcaagtacgccgctgtgcatcattccgggactatttcggttgaaaatgcccggaaacgaagtaaaatagggcgcgttatgaaagtagaaacttttgaaactccccaggatgctgccaaggctttggcaggagaagttgcggaattgatccgtacgcgcgccgctgaaggcaaaaacgtggttcttggccttgccacgggcgccactccgctgcctttttacgcagagctagtccgcatgcataaggaggaaggcctttcctttgccaacgtgatttccttcaatctggacgaatacagcggcttggatcgcgaccatccggaatcctactggtacttcatgcacacgaatcttttcaaccacatcgacatcaagccggaaaacatcaacctgccctccggcacggtgaaggatgatgaaattgccgcccactgcgccgcctatgaacaaaagatcaaggattgcggcggtatcgacctccagattctcggcattggccgaactggccatatcggctttaacgaacccggctccgatgataccaccgtcactcggcaggttcatctggacgaactgacccgttctgatgctgctcccgctttcggcggtattgaaaatgttcccaccaccgccattaccatgggcgtggctaccatcatgggcgcccgtgaagtggctttgatggcttggggagaaaagaaggcgtccatcgtgaaaaaggctgttcaggggcctgtgacggtggatgtggccgcctcctaccttcagaagcatccgaacgccaagttccttctggacaagggggctgcttccctcctttaattttacgttttagtaacggaaatgccgtctttcccggtttcgtgggaaggcggcgttttttatgggatgaaggaaggcggaagcttcttttttccatggaggttatatgggaaatgccgcctatgcaggcaaaaggagaggggtggaggttgtgcggggaggattttgtatcatcgtaacgaaggtaaaacctgcagtatggcaattgcagaggaatcgacacctcttcagctctccattgcggatacctcccggttcagggaaggcagaatcacagtccgcttccgcaacgaaggaaacgagcctgtccggattccggacgaaatcaacgacgaaacagccgattactttttcgtgactgtattgaggacggaacggggagatgtccgcgtcctgaacagaaaagtcgggaaaataaccttccatcgttccttgaactaccgggaactggcccccggccaggaatacagcgtcacgattccggtatgtctggatgaagtcgatctggaaggctggaaacaatgttcttgtgaactggaaacgcgctactataatcagcagggtaaggattgtttcctggggatgctccgggcgacggccaaactcgcgctgcaatgaaaaaaatcttccggtatttagtacttcttgcaagcctgtccctccatgccgcggcgtggggggacatggccgacaacggagtggaatgttccgtggtgatggaaaagacccagtttgacgcgagagaggctttccctgacttcaaactggtgttcacgaacaggggcgaaaagaccgtgcgcctgttcgacgacttctatcccctcaaagatgacggccgccctaatatccgtatcgaaatatggaaaaaagcgggagggaaaagatatgggtacagagtgggcgaaataaagactccaatagcctgttatggagccgggtataaaatcgaacgggtagcggctttgatgcgcttcattacgttgaagccgggagaaaagcatgaagtccccatcaaggaagcttacctgttgctgacgtattttgaccgtcttcgcaatgatcagaactatgagctggaagtacgtttcagggatgaatgttcgtatcccgatgctcggagggtgtatgtagggaaggcagaatttagtttgtcgcgccggtcgcccaaaggagttcctcggtgaataatccaagctgttggaggacatagcctattgttctcgttcttccaataacccacccaccagagagccagttatctattgttcagccatttgttccctgattatctctgtttcttgatacatttttttattatttctgagaaaggacaggttagttgaaataggtgaattaagggttcaatggcctgaaacctaataacgacgggggagaattgggacgatgggcgtagctttctccttatcattcgaaaatgaagttatgaattatcgtggaagaaatctccatcacctgtgaagaagccaaggaagtggaaatcggttttgaaggaaaggaaccggttattgcaaacgaagcatggaattgcatcactacgcctatcattcccagaatttttgtgacggcgtgtaaaggatgaagcagccgatgtctggaagctccgtattgagggagcggaaaggcgatccggcaatgtaggcggtaatttatcagtcccattgtcttaaatgggattccaaatttattggggtatcaaaaataccagtattttcaagttttgatcaaggaggggaggtttgtggactttgaggcggaattatgggatgacaacaggtttgaggaaaactgttgaacccgtccacggtgtgccgggaggatttcttcggacaggaaaaggctggggctatttgagccatgccaggaattcatggttgccgtcagttcccgtgataggggaaggttcgcaccccatccaggaacggttcagttcgtccgtgacgaaagtgcgtatggagtccaccgccctccggtgcaaagccgggtcccggacgatgccgccggggcctatatcttccggctggagttcaaactggggcttgatgagcaccagggcatcccccccttttttaagcagaggaaaggcggcgggaaggatttttttcagagagataaaggagacgtcggaaacgatcagatccacttgttccccaatatcctccggagtcatgtagcgggcgttgaatttttccttcacaatgacgcggggatcctgccgcagtttccagacaagctggttggttcctacgtctatggcatgcaccctggcggctccgtgctggagcaggcagtccgtaaaacctccggtggaagccccaatgtcaaggcagaccttgccttccgcagaaacggggaaggcattcagggctccttccattttcaggccgccgcggctgacatagcggggacggtttctaatggtgatatccgcgtcttcattaaccttgagaccgggcttggtagagggatgcccccccacgctcacttctccggcaatgatgagccgctgggccagctcccgggattctacgagattgcgggaaaccagaaggatatcgagtcgttgcttgctcatgattcggaaaaaggtgtgaacgcaggtatttcatgaaaccgcatgaagaatcaagaaaaaccgagcgcagagaggcattcgggcgtaaaaatgcggcattcctcgtactggagcattttacgattgattcaaggccggtttataggagactctgcggcggatggaacaccgctacaggcaattgatgcgcagagtcaggctttacctgctgacggaggtgcgcaaaaaatcgtgggcaagcaagttcctttccgccagggtttttgattctgtttactggtcatgggacaggcaatccgttgcaacgggagctgcctggggagctgccgcagcgattgcccctcttcccatgcagagcctgtggggcgttttcgcctgcctgtggcgcaagggtaatattcccgtagccattctgatggcgtggctctcccctcccggctttaccttttttgccattcccgctcaatggtggctggggtggttccttttttcgattttggggttccctacgtccggcgcgaactgggagatgctgaaagcgggggttcagcagtggtcctggacgccgtttggcggattgagcatcggcatggtaagcctggaattcgcagcgggctggatggtttccagcgttgttctgggcagcctgtgttacgggctggtgcagttgggatggaggatgggccagttcctgcacagcagaaaaaagagcggcaagttgtaatagcaaaactgccgtctgtgtaaggcagggcggaaccggaaagccgggcagtccggaaaaatcagacggctacttccatcagcaaaacggttgagttctggagggcttctatggagacggtttccgtatccgtaattccggcaccgtcccgactgtgcaatatggcatctcctatttttatttctccgtctatcacgaagatgtatacgcccgtgttccgtcccttgaattggtattcccgttctatgcccctgtccagctccgcccaggaaaaccaggcctgctgcatgatggaaatatccgtttccggagctaggaaggtagagatttcattatgcttcaacaggggggtgatgtcgtaatcccggtacctggggggcgtattgatcctgtccggaatgatccatatttgcaggaattccaatggttccgtgaggctgtcgttgaattcgctgtgctgaatacccgttccggcgctcatcacctggatttctccgcgcgtgatagtgtggctgttgttcaggctggctccgtggcggagccttcctttcagaggaatggaaaccacctccatatttttgtgcggatgggtaccgaagccttcttccgggagaaccttgtcgtcattgagcacgcgcaaagctccgaattgcatgcgttccgggttgaaataattggcgaagctgaaatggtaatgttcatgattgatatagggggagtgggagcggttttccgcttgcagaatgtttgaccggctgcaactctgggctgttcaaggcgaatgacattatttccaggaccgtaaaataaatcggcaacacaaattggtggtgcaatgtctcttcttttagggtagcgtgctgcagtacccgtgcaaagaagacaaggcttatggctcagcggacatttatgagatggatcaagggactgattcccacagtgattattttgctgggggcgttgttgctgggctgcatatgctacatctccatctggggggtgccttccttcgttgtgcagcgggtggagcaggctcttctggaaaagggcattccctcccatatagagacgctgaaagttactttgtggccccgtgccgtcgtgacactgaaaaatgtggaattgctggatccggaggccatgccggaaactcgccggcccatagttctgctgcatgaggcggatgtggcgctgaattggaaaaaactgatagaaggacaagtagtgccggagcgggtgaatgtgaaggggatggacgtctccgtgcccgtagatgcggggaatctggaaaaagttttttccgtaacgggggtgaacgcggaattgaatctggggcggcccggcatggtggacatcgtcaaggcagatgccgttgtgcagggcatccgggtgacggcccagggggcattttccattggtcaggatgattccggagactttacgctgacggctcaggatatgggcgccgtcagagagcagttgaatcaggtcctgaattacatggaccgggtgaagtggcctgatgcatctcctccccgcctgattgtcaatttaagcgacgatccgaaaggcggcgtgcgtgtaggcatggatttgcaggcgcctgttctcaggtacggaaaaatcatggtcagggatttcctgttcagcggggattacgcggattccgttatcatggccaaacactttaccatgcgggatgcggaaacggccggtttcgtcagcctttccctccaggccgatttgaaaaagcgcacgctgatctgggatgtccgcagtacggctcctctggtctcctgggcggtggctattgttgatgaagctctggtgccgaaggaaatgaagtttctgagcgagccgcatgtacagatatccggtcatgcggttttttcggaaaattgggaaggcgtggaacatctgaatgctttaggttccggatccatgggagcattttccgtgcttggggaaaaattccagagggcctcctgcgatttcagttatgaaaacggtaatttttatgtaactgatctggatataaggcatcccggaggcagtttttccggcaaggtaatgggagtggacggagagattaagatagacgttcacagcactctgcctatgaaggcgatgctggggatggcccgttccattgccccggaggatgcgaagctgccgccagcgctggaaatcaggggagacccggaattgaaggtgtacggttccgtggatatgggaaaggggtggaaagggccgttccaggtggaccgcctccagattgaggcttccgtggcggatgtcttttaccaaggagtggaattcgtttccgctgcggccagggcggaattgattggccgttccattaacgtcacccaattggaattggtgcgggatgacggccgggtgaagctggaaggaagctatctgggcaccgaccttgtttttacgctggaatctaatctgaagcctgaactgctggagactctggctggaaattggttttctgtcccagaacatttgcagcttccggaaaaagcggttttatgggtgcacggcaggctggatattccggagggcaagcctgtggagccgactctggtccgagcacgcatccatacggagaatcttgcctggaacaaggttcctgtcaaaacggcggatgtggaagcggaataccgtcccaaccagctttttgtgcaaaattgccggatggaaatggaaaagggcgtctttgaattgttcgccaacggttttctggacggtcagatgtttgtgatggggcagtccacggttccgctgcaaacgatagaccaattgttgagcatggaggatgacgactttttcatgaaccgctttgtcttccgcaaggattccggcctggagttttccttccagggaacgttgggtctgtacaatctggaaaaggcttacgacttgcaggctactgtttccgcaaccaacacgcgctacaggggggtggacttgaagtctgcccgggcggatgcccatctggtgacagaccagctggtgctgaccaatgtgacgactgtggtttccaacggaaattacctgtcttccgtcggattgtccggaggcccttcggaatgcacgctcaaggccaagagcatagatttccgttttgtgcaggatacggtggaagtgcttggtctggaggggcaggcctatcccggctataccctgcggatgttttccgatagtgccgccagggttttgaaggagtttgtctttacccggcccgtaacgctttccggcggcggcatgtttccgatgggggatgacatgaagctgatgaaggggcgcatccgctttgacgcttccgccgggcgcgtgcgctatcccctgctgggaaccacgctggacctcggaaggacaaagggggaagtgttgatttctccgcaatgggtggttgtggacaagatgatgggaaccatctgggacggaaccttcacggggcgcgttctggcgcagattgacgatggggatgccctgaacggttcttttgtcctccaggacatgaatttgacgtctatcgggaaatcctatgacaaaaaaatggagaaagccactgtgcacggagccattgagttttcatccaagggcggcaatatgaattctattcaggcgaagggggaggctgccctggtgcatggcgacctggtggaaattcccctgttcggatttttgggggaagccctctctaattacattcctggactggggcatctgattaattacaagatatccagggccgattgcgatttttccattgagaagggttatgtgcgcaccagtaatttcgtggcccaaggaagcaacatgtctctggaggggggaggctggatacgcctttccgatttgcaggtcaattcagatttcaagctggggcttcgcggtttgccggggtttattacttccccggttttcctgttggccggagggctgtttcaagtgcggggaacggggcctttgagcaatgtttcctggaatttcgctccgttttccggagggaaagcccccgttcctcccgccgcggcgcctgcccggaaaaggtagggcagacgaaatatttgggtgttgcgcaactgccgtaaggagccgcatgccttgcagcaattgaaaataacagatgccggatatctgacagaagataaagagctgtaaattcagaatgcctcgtttacggtgctttccctcaggaaaaggagttctcggagaaatttttcttaaaccagagtataggcggaaacagctgtaatgctcaatttctgtaggaaagaccagtgaaacaagaggtttttccccgggaatgaaacccggggctgaacggtgccggagcgtaaaaacgtatgaactatggagccggaaggaaatatccccaccatgcaatcctgaagaaggtgcaggagttccttcatggaaaagacaggctgccggtttccgttgaagtgccgcgatttgcttcggccgttctcctatgtgaacgcccgcctgcatgttccatacgggaagatcgtgcggtccggtacgctgctggctggatgggaataagccgattccggggccggatcggtggggccataatggcgttcttttactgaggagaggatgtggctttaccggaaatagtctgcggcaggagaggcggttttaacgggtaaaaaagcaaataaggcaggaggtgttggcgtaaaagaaggaagtttttattccggagtgggtccgttaaaaacggggcggctgaactgctccagccaccccgttgaaaaagggagttatttaccggattttcccagtttgtacccggcgtaggtttccgtgttgtacaggggctggttgtccggcacggcgtaaccaatggatttgcgaatggcgaggaagtctgccacgccttccggccccacctggttcagaggtgctttgtgcagtccggccatcagcaccatgcggcagtaggcatccgcattttccatgaaccattccgcttcttccacgtcacgtgctccggtaatgactccgtggttttccatgaaaacgacggtggattgtttggctgcttccgccacggcccgggccgtttccagagagccgggcgttccgtaaggggccagcgggatgtgccccaggaagatatccgcttccggattgatgccggaggggggaacctgcccggcaaacaggaaggcattgcagtgcgggggatgggcatggatgcaggcattgacgcccacggatttcatcatggcaatgtgcgttttcacctcgctggtggaggggcggatgcccgctttctggcgcgcgtccatgtccaccatgcagatgtcttccacagtcatgaagcctttggaacacagggtgggggagcagagcagcaggttctgagccacgcgcacggagatgttgcccccgttgccgtccacatattcccggttccacaggcggcgccctatgtcgcacatgcgttccttgatgaccagaatttccggggaatggaagaattcattcacttcctcccgcgtgacggggttgtatttttcccatgggaacactttgtccggcaggggaggggagattgaccagtcttctgacatatttagtagcgtgttattggttgaacttttcgtaggcggcttcctgggaacccggcatatatgtccggtaggtgatgccgaaggcggcccgggcctgctccggcgtagagtacaccccggcgcccgcaaaggcaaacatggatgctcccaataccgtactttctgacacttcagagactttgacgggaatccggagaatgtccgccctcatctgggtccaaactctgtttctggcgcctccgcccaccaggatgaggaattcgcttttgaagccgcccacggattccaaacggcgcaggcgggatttcagccgccaggtgagagcctccatggcggcgcggtagatatggccgcgtgttcttcccagcaccagtccgttgatggagcctttccggtctccggaggccaggaagtccggaaccattgtcacgccgtcgcagccgggtgggacggcggccgcttccgcatccatggtgtcataggattccccgtgaaagcaggctgctttcacccattcgataatgccggagcccagccattggagcccggggttaagaaggccggattccgcgtcgaattccgccgtggcgccgtcctcataatcttcccgggccagcctggcctgtgcggagcgcgccatcaggatttcccatgttccggaggaaaggacgggctggttcttgtctgctccggaaccgaaaatggcgaactgggtgtcgtgcccggcggagataacgggaatgcccgccagggccgggagattcatcgcgtctgccgcttccggcgtaaggaggccaatggtttcccctgcatccacgatgggagggaagaggccgcggctcaaaccgaggcagttcaaaatgaattcggaaaaatctcccgtttccagatccgtgagctgggaggtccctgccatggtccggtctgtcgccatgatgccggtgagcttgtaggccagcaggttggagatgaagagccacgcatgggctttttccagaagttccgggtggttttccctgagccagacgagtttgtaaatggtgttgaaagcaaaggcccccacgccggagatacggttaagttcctcctgggagatatatttgccgatgtttttcatgacctccgccgtgcgggggcatttccaggatatgacaggatagagcaggttgccggcgtcatccaccagcgcgccgtccacgccgaaggtggtaatcgtgacggccgtcacctgttccgcatttagcccttccagggccttcacggcacattcggagagctgtctgaaaatccggtcggcgtcccagacgtgaaattccggattttcctcaccgggcagcgtggcgttcggctgtgaggcctttcccacaatgacgccttgttcatccacaaccatggcgcgcacattagtcgcgccgcagtccaagcagagggagtacatgagttaagatttaatagtgaaaagttaataggaatccggctgagcttgttgagttggtttgttaatagaaatgagcattttagggatttctgtgctgtcttggttgacagaggaagattccgtttccgtcaggcttccgtggcatgcaacagtttaggccgtgtatgcgtcccggaatattccttcaggacaatgcgggttttggaaaagaagtcccttctgcggctcccgtaagcagcttcggataaattggcggcaatgcccgcaccggaacgtaggagctggctgagcaattcccgttcgacgccctgctttttcaagtacctgcatcattgaataatgcggactgcgaaagaaaagcttttcgcggaaacgggactttctgccatgttttatccgaagctgttaactattacctattaactgttaccttttcgttttcagtattttccgtataatggcccgtagttggcgcaggcccggaaatcagctccttccgggtccgccgtgccgtggagaccccaggcagaggggcggtagatttggtcatccggaatgttatgggcgtatacgggaatgcgcagcatggaggccagcgtcaggatgtctgcgccgatgtggccgtaagtaaaggctccgtggttggctcccatgttggccatgacgctgtacacgtccgtaaaggctcccttgccggtcaggcgcggggcgaaccaggtggtcggccagcccgggtcagtgcgttcgtccagggtcttgtgcacctcggcaggcagatcaacagaccagccttccgccacgatgaggacggggccgagtcccttgacgatgttcaggcgcatcatggtgacgggagcgccgcccctggtgacgtagtggacggagtagccgccgccgcggaagtattcccggttggccgggcaccagacggcttgttccatcatggttttcgcatcgtccggagtgacgtcccagtgttttttcatgacgggctgtccgtccttgcccgtgcaggccatgcagccgtccagggcggcggagccggaattgatgaggtggatgatgccgtccttggcatggccttccagcgtataacccgtgacgcgctttacggcttccggactccagtaggtgcgaacgtccgcgaagacattggcctgtccggtcagcagatagccgaagaggaggcaggcgccgttgagagagtcattttccgtggcgaagggaagcggggcgcgcgggccgttccagtcaaaggtggagttaagcagggtttccgcgatgtctccgttcgggtagaagtccgtccagtggcgctggccctggaaaccgccggcaatggcttggtaacccagggattcttcttcgcggtcaattttcttgagcttgggattgccctgcatcatgtcgcggaagatcatggccatcagcacgctttccctgaaagttttgcggcgtccggcttcatccagcttcaggtccggacggtttttgtcctcggcgaatttaaagacggagtcagcccattgcatggcgaggtcgaattccgcttcgtcataaattttctggtccatgcggcggcgcacttccgtcatgtccacggcctgtacgcggatgcccaggtaattttcccagaaagactggtccacaatggaaccggcaatgcccatggagcagccgccgatggaaagatagccttttccgcggagggtggctacggtgaggccggcgcggcagaagcgcaggattttttcagctacgtcttccgggatggaagtatccgtggcgtcctgcacgtcttttccgtaaatggagaaagccgggaatcctttctggttcaggccggccagcgcagcggccagatacacggcaccggggcgttccgtgccgttgaagccccagatggccttgggagtgaacggatccatgtcaaatgtttcactgccgtagcaccagcagggcgtaacggccagggagacgccgacgttgttggccttgaatttgtccgcgcaggcggcggcttccgccgggccgccgatgcaggtgtccgcaatcacgcatttgacgggttctccggaggcgtggcggatgttggcctcaataagggcggcggccgccttggccatgttcatggtttgatcttccagggattcccggacgccgaggcggcgaccgtcaatcgtggggcggataccgatggttggtaatgctgttttcatatcttgcgtaggtgatgtgaagctggttcatgcctgggcaggcttttcttcctcttcctttttcagatgagtgttgcggaagaagaagccgtaaattaataccacggcaaagcagatgatgggaataaagaaggatgaccgcaccgctttttccacgaagttttcctgggccgtctggaattgcttcatgtccaggggcagggcgatgaggttgtccagcacttccgcctggtttccggataacgtggagagcgccggaatcagggagaattgctgaatttgctgttctcttccggcaggagcggggaggcgttccagattggctttgaaaacggccagttccctaggcttgagggaggagcagccgggcagggatttggccgcctgctcaaaagcgtccccttccagggaggggagggtaaagaaggtttccaggtttttctggaatttgccggcggccctggcttgttcttctccgtccgcagggctggcttctgacatcctgtacagcgccagcatggctccagataaggatttccgagcgtccgcagcttccgcctgcgcgatcagaggacggttgatggattcaaaataggccacctggttttttactgtggtgttgtctatccaggaacccatgtacggggtaatgactgcgccgcccagaatggccatgataaggcccgcagctcccagtttcacttcagaccccagtccgcgcagggcgatgccgtaaatagtggggaacatcagggacatgcagccggagattccgaccagtgtccagacggagatttccctgggcagatagatggtgcccaggcagcagagaatgccggcgacggcgaaaagggacatcatgttggccgggttaaattttttcatcagggccgtagtgatggcgcggcaggcgatgaacaggatgatggaaaagatatagtagttggaggccgccgcttcctgcattccggggaagacggacatgatgtatttaatcgtccacgtccacacggcaatctgcacgcctacatagaaaaactgggctgccacgccgcagaagtagcgcggaagcttcaccagtttcataagctggcagcggtagtccggcatgatgagcaggaaggcgatgggcccgatcatcataatcaggatttgctgcaccatgctgaattcgaaagcggaatagtactggaacaggaaggggatgagaatcagggcgatgcagagtcccaggcggccgagtttagaggaaaggggctgtgtgttttcccgggtgggtacgttttcatcgtcggatttgtaacggcagaaaaagaaccagatgacggcggcgatggctaccaggcccacataaggaacgcatacccagaaaagttcatcgctgacaatggcgttcagttgttccgggtccatggctttgcgggtgtccatgtccgcatcgttcaagtgtgccagaatgaaatatttggccaggaaaatacctgtcagggagcctatgggattgaaggcctgggcgaagttcagacggcggacgctcgtttcctgggaccccatggagagaacgaaggggttgcaggtggtctccaaaatggagaggcctccggccagcacgaagatagccatcagatagatatcgaaactttgcccgatggcggcgggaatgtagcacagcgcgccgatcatgtagagccccagcccgatgaggacgcccgccttataggaaaattcctccagaaggatggaggcgaaaatggcaagcaccgcataggccccatagaaggaaatctgaactccggcggattccgaagcattgatcatgaatattttgctgaatgccggaaccaggttgtccgtcatgttgttcaggaggccccacagcgcaaaacaggagaccagcatgaagaacggcagccggtattgtttgggaacgatcggcacggtagaggtacggttgttatccatattgcttttgtcaatttctcacaaggacggcggtgcgtcaatctggaaaccgaaaagagtccagaaattatccaacctgttgataaaaaaaataaaatgatgtttttccatggtgatattccgtcagtgtccgcagaagctctttcttcttcttgacttgtgtttccgcggcggataggaatgaagagatgaagaagagtattctagccgtctgtctgggcctggccggattctggagcgttctggctgaagattctcccattgcggccccgggaagggtaaatgaacagggggatgcggaactgccttccggggaattgttgtcggatcatgtggcggaagcggaatttacgggaatgattcatcggaaatgcaggttccttacttccctgtgcccggacaagtgcgaccatgccagggatttcgccgttttccggatcgtcaagtacctggattaccggaaaccaggcaagtacggcgatgaaaagcaggagcagctgatggttgacgttaatccggcgcacaagcccatcctgcagagtgcggatattttgaagaagatatccgcccttaaaccgggggacaaggtggttcttcactgggctcattattatatgcaccggaattccagttctttcccggaacgtcccgtgatttccgtggagccggcggctctttccggaggaaaaacgggaaagtaaggactggtctttcctcaggccgttcaagcggggctggacgcaacggaaagccgtgtgttaggaaacggaccggcaaataacgctgctccgggcaagattgccgcggggggcggcgtatatatcccgcgaaacacaccataaatacgatgcgtttatctttgaataaattaatggggcttggcctgttgtgcgcactgggcctgtctattccctccgttctcggcaaggaaagctttgagcaggccaggcgtggcaagtttacaacgctttccaccaaatacggccttatgtcctgccggaacggtgtggcggaaatcggaggagggggaaaatccggagaagcctccctgcgaatgttcggcggacaggatgctgaattgaaactggacttgaaggatacgccttccagggaagtccggctttctgcctgggcggagcgatggaccgggcaggccccttttgaattttccattgtggccatagggccgaatggagaaaagaaaatttatgacggcaaggatatcaggacgggcgggtttcataccaggatagaagccagtgttccttccggaacgcgttccctggtgttcaggcttacttctccggaaaacaagggaatgaagctggacgacctgtttcttgttccctgtattcccatgaaagtgaatccgcaggtggagatggcctcttccatttacccggtgatggtgcgtatcccgtgcagccccgttctttctctgaatgtccggacggacggctgccttaatcctcagttcctgacagctgtcaatctggattttacgggtacgacgaagctttccgacattgagtccgtggctgtaatacggggggaagaggcccctatcatccatcatggggaagagccgttcccgaaagactcttcccaagtttttggtacagtaaagcttgccggttccgccagaccccagatttctgtgaaggggaaaatggagctggagcccggagacaattacctgtgggcttgcgtgacgatgaaagaaggagcctccctggacggcagggtggtggtgcgtccggccagcgttgtggcgggcaataaaccggtgagggttgccaatgcgactcccgtggcgcagcgcatcggcgtggccgtagtcaggcatggggatttcaaatcaaaattctaccgtattcccggtctggcccgttccaggaagggaaccctgctggccgtgtacgatatccggtacaaccattccggagaccttccggccaacattgatgtgggcgtaagccgctctacggacggaggccgcacctggtctgatgtcaaaatcgccattgatgattccaagattgacccctctctgggggctaccaggggcgtaggggatccggccattctggtggatgaaaagacggggcgcatctgggtggccgccatatggagccacaggcattccatctggggcagcaagtccggagacaattctccggaggcctgtggacagctggtgctggcctacagcgatgacgacggcctgacctggtccagtccgatcaatatcacggaacaaaccaagaacaaggattggcgcattttatttaatggacccggcaatggcatttgcatgaaagacggcacgctggtcttcgccgcccagtactgggacggcaaaggggtgccgtggtccaccattgtttattccaaagaccggggaaaaacctggcactgcggcacgggcgtcaaccagcagacgacggaagcccaggtgattgagctggaagacggctccgtcatgatcaacgcccggtgcaactggggcggttcccgcatcgtgggcgttacgaaagacctgggccaaacgtgggaaaaacaccccaccaaccgcactgcccagctgaaggaaccggtctgccagggcagtctgcttgccgtggacggcgttccgggcgcgggcagagtggttctgttttccaatcccaataccacatccggacgttcccacatgacgttgaaagcttctacgaatgatgccgggtcatggccggaagacaaatggcttctttatgatgcccgcaaaggctggggatattcctgcctggcgccggtagataagaaccatgtgggcgtgctgtacgaatcccagggggcgctgaacttcctgaaaattccctataaggatgttcttaacgcaaaaaatgcgcgctgattccgtttcccggtaacatgttcaacgggccgttttcgttggagaacggcccgtttttttgtttccgggtgtttttgtgaaaggacttggccgctgcgctacgggttatttgccgctaaagacgggaaactgtaccaggaaccggatccccaccctttggcgggaaagccggcggtgtgttcttaacttgttttgaggacgccattgtcaggataaaaaggaagcaagagcctccttcagcatgtttctggcgcggaacagcaggcttttggtagcgggaaccgtcatatccagcgcccgggctatttcctcatagggcatgttttcgaaacggcgcagttggacggccagccgcgccttttccggcagagcggcgattgccgcgtccacggcgtgctggagttccgtatgttccagtgcttcgtccggggtctgggaaggttccagaaacacggccatgcctccttcctcctccatggcgtctgcggaggtggtgggcttgcgcttctggcggcgcacttcattgaacaccagattgcgcaggatggtgaacatccatgtggtaaaccgtgcggaaggttcataattcccggctcccttccagatgcggatgaatacctgctgggcgatgtcctctgtctccggaccgttgttcagcatacgggccaccgtcgcatatacggaattctggtgtttgcggaccagcatttccatggcggaagcgtcgccattcctgaccctcagcatcagcttggcatcttcgtctggttccgcaggcggcatgtcttgtgcttcatccatgaaattcccttttataaaccccgtctccggtgaaaggttgcagccggcagggcgcattccggaaaaaggtctatcccatttttacacggctgactagatgaaaacgggtctttcttttctttccgcagggaatggaagtaaaatgttttactctttccaaagcccgggaaatattcgcgcctttgcaggagagaacccggtgcacgatggattccctccatgcccgccgatttgacaggggccggaaggggcttgtcagggcagggaagaatggaagaaaggaatatcggctaattaatttgtttaaggaatcattccgaatttcttttctcggcttcttcctggttcagttccaaatggggtattccctcagaagtttatgaagaaagcatgaaggaatgcatggagcggaaaacagggattcctcaatggtacgttattgtagacgggcagcggaataccattgcgggagccggagtaattgaaaacgattttcatgaccggaaggacttaactcccaatttatgtgatctttttgtagaggaaaggaaacgcgtcaggggaatagccggggtggtgccggattttgtgaggaaggatttggcctctctcggatatcccaggctcccaaccacactccgcgcggaaagaagagcaaggaatgaagaaagttccccggcaaaaggaaaagaggggaaaataatgaaaaaccgtccggtgttttcgttggaagatgcacggagccgcctgccgggggaggactctgttcttgacagcatttcctgtctgcctgataacttgataatacgagtacccctcagcagcatcaggaaacgccgccatgaaacaatgcatgaattccgaaaatttgcatcgccgcctcaagaagattatcggacaggtgcaggcaatcgacaggatgattgacgaagacgttccctgtgaagatgttcttgcgcagctcaatgccgccaagtccgccttgcataaggtggggcaggtcgtactggaggggcacatcagccattgtgtccgggacgggctggaacacggagacccggaagagacgatcgcgcgcttcaccaaggcggttgagcggtttgccaacatgatttgaatgggacaaggggttaatgcctttttccggcaggttcgggggtggctctcatatttttttcttgaaaacctatacccctataggtatataaatgcccgtacctgtatgggtataaaaagaaaaatcatcatatgctggaccgattggaaaaattgctggaatggggagggacaaggcggaaagtcgcactgttgtccgtttccggattagctctgttaatgagcatgcttggcatggaacctttgccctttgaagtttcatggatagccattgtgctgtgcggcgttccagttgtgctggaagccgttcttggcctggcgacggcctgggatattaaggcgggagtgcttgtttccatcgcgttgatcgcctccgtcatcattggggaggacttcgccgcaggggaggttgcatttatcatgcagcttggggaactccttgaggagctgaccgtggcccgggcccggaagggtattgaaaggctggtccgtttgaccccggcgaccgcccggaaagtggaaggaaccagggaggaggttattccggcggaagaggttcgcatcggggatattctccgcgtattgcccggagagacgattccggcggacggcgttattctttccgggcacacttccgtcaaccagtccgtaatgacgggggaacctcttccgatagacaaggaagccggggatgaggtttccagcgggacggtcaaccagttcggaacctttgacatgaaggcggccaggaccgggaaggacagttccatccagcgcatggtgcgcctcgtccaatccgcagatgcggggaaggctaaaatcgtgaggctggcggaccgctgggccacctggatcgttgccattgccctggtttccgcaggggggacctggatggccacgggcgaattgattcgcgccgttaccattctggtggtattctgcccctgtgcgcttgtgctggcaactcccacggcggtcatggccgccatcgggaacgccaccaggcatggctttctggtgcgggaaggggatgccctggaacgcctgtcctgcgtgtcccatctcactttcgacaagacgggcacgcttacctgcggtgctccgcgcgtggcggccgtgcgcagtttcctgccggagctcccggaacaggaactttacagatatgccgcctgtgcggaactgcgttctgaacatcctctgggcaaggcgattgtccgctgttaccggaaagattcagtgcgggaacttccccaaccggaacaattccgcatgattcccggcaggggagtacgggctgtggcgcagggaaaggaacttctggccggcaacctggaattgttcagggaaaacggggtggagctgtccgatgaggccagacgtgcggcggaacggtatcaggaggaggggtgctccgtgattttcataggaatggaccggcatgccgcagggttgatcgccctgtcggataccttgcgggagaatgccgtagctaccatccgggaagtacgggatgccggagtggttcccgtattgctgaccggggaccatgggaatgccgccgcgcgtgtcgccggacaactggggattgacctggtttgcgcggaatgcctgccggaggacaaattcaactggattgacgcgtgccagaaagagcggaaccgtgtgtgcatggttggggacggaatcaatgatgcccttgccttgaaaacctctcatgcgggaattgccatgggcggcataggaagtgacattgccgtggatgccgcagatattgtcctggtcaatgacgatatccgggaactgccccatctgctccgtctgtcaaggcgcatgatggggacaatcaaatgcaatctgacattctccatggccctgaacttcatcgccatcatcctggcggcgggcggtatcctgaatcccgtggctggcgcgctggttcacaatgcgggctccgtcgtcgtgatcgccaactccgtttttctgctgaaatggaggaggaaaaacgcgtgaatccgcctggagggtagagaaactttcccgtgttgattgccgggagggaacggagtccgtctttttggcgctccggtttcaccgcgccgggctggaaaacgcttggatgaaaagaaagtccgtgttattctttttccagttcggcaggggtgcccaaataaaggctgagattgcaggaacggcatgctgttcccgcagaacccttcaaacctgatgcgaataattccgccgcagggagttcgattgaacgagcttgtcctgtttttcggggaggtttcgtttccgctgttcccctgccggaacagaacagcattcatcccatgaacgatacctccaatttgtcttatcccggttcccgccgcatttatgttccgggccgtctgtacccggatgttcgggttcccatgagggaaatcattttgggcgataccttgttgcccgacggcaccgcccaccctaatgacccggtgcgcgtgtacgattgctccggcccctggggagacgctgcttatgaggggactgcggaggaggggcttccctccctgcgtgccgcatggatacgggcccgcggtgatgtgaaagaggatgtggggcaggagcgcaccctgcgtgctgcgggcaagacgcctgtgacacagcgttattacgcccaacagggcgtcattacgccggaaatggaatttgtcgccatccgggaaaatctgggcagggaacaggctttcaaggcgatatacgaccgctatccgaatgccaagagccgcccggacgaagctgcggaagccctggaaacgctcaccatgatgccgcgtccgtccgaattggaggcgcaggagggatttgggccgtccagcatggtggcccgcgaccgcctggattaccagcatgccccggaacgccggaacggctgccgcatgcctgcctactttacgccggaattcgtcagggatgaaattgcctccggccgtgcgctgattcccgccaacatcaatcatccggaatgtgagccgatggctatcggccgcaatttcctggtaaaaatcaacgccaacataggcaactccgcgctggggtccagcattgaggaggaggtggaaaagctgcgctgggccattcactggggggcggataccgttatggacctgtccaccgggaagaatatccacgcgacgagggaatggattttaagaaactcccctgtccccatcggtactgttcccatttaccaggctctggaaaaggtgggaggaaaggtggctgacctgagttgggaggttttccgcgataccctgcttgaacaggcccgccagggcgtggactatgtgacggtgcacgccgcccttctgctcaggttcgtgaaccatacggcgcggcgcatgacgggcatcgtttcccgcggcggttccatcatggcgcagtggagcatgatccacgaacaggaaaatttcctttattcccattgggatgaaatttgttccattctggcggcttacgatattgccgtctccatcggggatggcctgcggcccggttccgtggcggacgccaacgacttcgcccagctggcggagctggaagtgcagggggatttgaccatgcgcgcgtggaaagcgggcgtgcaggtcatgaatgaaggccccggccacgttcccatgcaccttattggagagaacatgagcaagcagttggaatggtgcatggaagcgcccttttacacgctggggccgctggtaacggacatcgcccccggttacgaccatattaccggagctatcggaggggcgattatcggccagcttggctgcgccatgctttgctatgtaaccagaaaagagcatctggggcttcctgaccgggaggatgtgagggaaggcgtggttacctacaagctggcggcccacgccgcagacctggcgaaggggcatccatccgcgcaatggagggataatgccctggcccaggccaggtttgaattccgctgggaggatcagttcaacctttccctggatccgcaaaaggcccggtccttccatgacctgacgcttccccatgccaacgccaaaaaagcccatttctgttccatgtgcggtccggacttctgcgccatgcgcttgagccaggatatccgccgtcgctcacagcaataggcgtcttttctccggcatttcggggggcttgcggttccgagggggccagcccttaaaaaagaatgacaagccccggtatcctgctatagtacggttaagatgagaaattcattttttcctgcaattggtgttctttccttggcctccgctttaatttgttccgcgtcttcctcctgggagactgattggaataaggcgttggagaaggccggaaagggcggacatcctgtgctggctgattttaccggttccgactggtgtcccggatgcattcacctgcgcaaaaatatttttgacacggatgcgttcgccaaatatgcggcggatcatcaattcgtgctgctggaactggatttccccaaggctgccgggaaaatgccgccggaacagctgaaattccatgaagagctgatgcggcgttatggcgtttcctcgttcccatccgttctgttgatggaaggaaatggcgctccctacgctaaaatagtgggtgccaccagaaccccggaggaatatctgaaaaaactggaggccgccggagaaacgaggaggaagttgaaagaggccgtagcggcggcccagccattgaaaggaaaggaaaaactggagcaactggttaaggccttgaacgtgcttccggaagatttgcagcctttccagaaggagttgattgcagaaatttccgctctggacccggaggacagatacggttttggaaagaagtctgaaaaagccgcagccatggagaagcagcggcttatgtgggaacagttctgccaaaaatattcggggaggctctccgcagaagaaacgcgcgccggccgggaggaagcattgcagatgttggagaaaaaggatacgcttcctcccatccgcctgaaggtcgccaaatatatcagtgatgggtatgtcttggaacgtaatttgcccaaggctttggaatacctggaaattgcccgtgatgccgatccggagtctcaagccgccaaaaaactggaaccgtggattgacaatatgcggaaacatatcaatcaggagaagtaaaaattgttccgaaaggcatggccgtcttccgtcgaagggggagggccatgcctttccgttttttattttaaacaaaaaaacagggctgttgcgctatggctgatgaaggaaccgaatgtacggatgcagaaatgaatacgccggcttacgtcaggaatgaggaggttgatgaagaaagcagccatttgctgagttgggatgagtggctgcgggaacatgcttcccagctgctgctgtttgcacgccagcagtcccgctctccggaagatgcggaggatatacttcaggatgccctggtacgtttggctcgcaaggaggcttccggggaatttgtgggtgggcaggaggcgtggctttcctatgtctttgcctccatccggcgtctggcggtggattatggccgcaaatccgaccgccgccagaaaagggaggatgaagcctgcgcctctgaacgggacgaagatgtttatacggacccctggttttccagtgctgcggcagatgaggaactcaaacagttcatggaaatgcagctcaggaagctcccttccaaattctccgaggtcattgtcttgaaaatatggggggaacaaacttttcagcaaattgcggaaacgctggaaatttcgcagaatacggcggcgagccggtaccgttacggtattgacttgctccgcagggctttgagaaataaaaagaatcaattctaatgccgctctacccttatgaaccatgaaacaacatcatccgccgcaggggaggaagacggcggtactgccgtcctgcagccccttcccgtatctgatgaactgatttcccggctggccggaaagtgtgaggaaatcttccctttggagagccgtttccggcgtgatgaaatctccgatgatgaaattcatgagatggaatcccttttgaaacgttttcggccctctccggcaaaagtcctgttcagggaacaatgctgtgccctgatgtgtgcggaatccgaacatgagatggaaacccggttgaaaaggctttccgcttcttccatgttggaattttccgtctgtaaaatggcgcaagccatgaattgcgccagtgatgaaaaacgggaaaaagcgctgaacatccccctgtggcggcgttgtgcctgtatttccggcatttccgcggctgccgttgtgggggccgtcatgctggttcaacatgctctggtggcgcccgtagggacggtggcagccggaaatgccggggaagttccctcggaaaaggctgaaactcctgtgattcccggtgaaaagcgggagttgctccggacgcccaccctttttgaattgcagggaggggatgagcgcgtgcctgtgattgctcccgccgttatccgcaaaattcttcctgaaaaggaatattaaaaattgcggtgcatgaatatcgccggaattgtgcgatctgctgcggcattgcggctttccttggcaggcaggaaagatgcctagcgttttccggtgttctgcggcgaaggatgccgtcccggaagcggcgaaaaaaatgcacaaattttgaacattgtatggacagatgctgtatattatctcacatggatatgaaaacctgtatctttctgacattgggattgctggtaggttcgggctccggatattccattgaccggcccgcaggaagtacggacaaccttcagccgcctcctctgacgccgtacgcgcatcaggtgaagccgctcccctcttccaaaccggccagactgggaattgttccgggcacggtgcctcaagcgctcgttgcgcagctggagcttagcggattccccggagtgctggtgaccaaagtgatgccggacagccccgccgccaaggccgggctccaggaaaatgacgtcatggtcaagctgggggatgtctccctttccggtccgcagtctgtgacggaagccctgtctgaaaaagtgcctggagacaggattacggctgtattttaccggaaaggaaagagggagactgttgaaattaccctggatgggggaacgctttccgctgaagaaatactggcggcccagggggatccccgcacgcagccccgcgcagttccttccgtccggcgtcagacggcgcctttttccggaatggctgcacggcctaatctcccccagcgtattctggatatgcagcagatgatggatgagtttttgaaggattccgccatggatgattaccggatggacgacatcatcggccggatgaacctgactcccggcgcggcgcagatgctccggagcttgcagggacttcatcaaatgcccatgcctcccatgggcaaggtttccggagggggccagagcatgtcttccgtccggatgtcggatgccaacgggactatcgtggtttcttccaattcccggacgggaaccacagttcatgtgacggactctgcgggaaaggttctgtattccggcccctacaatacgcaggaggaaaaatccgccgtgccggaagccgtcagggaacgcttgaaaaacatagaaaccaatttctgcttttaacggcttcatgaaatagcggagaaattcgtattcatgaagttgacgacagctgccccgtgcggggcagcttttttattacgtggaagaagaggggaaagctgtgttgatgcggctgatgaaaataatgacgggcagaatgaaaggaaaatcatggaaatgcgtatcctttaacaaaatagaccgcttcatggttaagtgcaggtgttgggaaaacggcggttttttcaggctgcccgttttctggcggcggtcttttcacaaagaacgacatgaatggttttatttttattttgtggatgctttgctgcgcttcttggagcctgggagcggatatatttgtttctcctgacggagatgacgctcatgcggggacggaagaatttccgatgcgttccgtggaggccgctgtgcggaaggccgggcaagggcattacggaaaaggctgccagattatcctggccgacggtatttatcacctggaggaaccgctgctcctgcgtccggttcattccggtctgactattcgtgccaagaatccgcataaggcggtattgagcggtgctcagccctttgttgcggactggaagcccttccgtgatgggatcatgagaacttccgtgccctccggactggaaatggacgtattattggtcaacggcaaacccatgcacatggccaggtatcccaacgcaactcccggagaacgcattttccagggaacggccccggacgcggacgctccggaacgggtagcccgctggaaaaatccggcgggtgcgtatctgcatgcccttcatcatcgcatgtggggagacatgcacttccgcattgcggggaagaatggaaatacactggtcaagcaggggggctggcagaataaccgtccctctccgccgcacgaaaaatataaatttgtagagaatgtttttgaggaactggatgctcccggagaatggtatctggacagaaaggaacatatcctttacctgtatccggaacagggaacggacctggctgcagccagactagaagccggcggcctggaagaactggtcaaaatccagggggaaggctcatcccccgtcaggaacgtgacactccgggatctggtgctgactggaacgcggcgaaccttcatggaaaaccgggagcccctgctgagaagtgactggaccattttcagaagcggagccgtactcttgcggggaacggaggggtgccgcattctctcctgcgaatttgccaggttgggtggaacagccgtttttgtggacgggaataatgaaaatcttctggtgcggtcctgttatatccatgacataggttccaacggcgtagcgtttgtgggggaccgttcctgctaccggggaccgaagaattatcgggaagccaaaggaatgtccttggagggaatcgacagggttccgggacctcgaaacaatgaatttcccaggaactgcatggtggatgattgcctgatcacccggacggggctggtggaaaagcagactgccggagtgcagatatccctggcccgggaaattaccgtcagaaattgttccatctacgaacttccccgggcgggtatcaacataggggagggggctttcggcggccatgtgattgaatacaatgacgtttttgataccgttagggaaaccagcgaccatggttcgttcaactcctggggacgggacagattctgggtccgggaccagatggcgctgagccaggacaaggacgtcgtcctgctggatatccggcagcctaatatcatcaggaacaaccgctggcgctgcgatcacggatgggatgtggacctggacgacggttcttccaactatattatttacaacaacctcatgctttcctccggcctgaagctccgggaggggttttaccgcaaggtttacaacaatattatggttaacaaaaccctgtacccgcatgtatggttcaggaacagcggggacgaattttacaataacattatttttgaagaccgctaccgtcctgccggcaacatggatttttccccgtggggaaaactgatggacaggaactttgtgcatgtgaagggaatgaaaggggtggaacccgcctccgaactggccaggcaatccggcaatgacaggcactccctgaagggggatgccctgttctctgctcccggtctgggggatttttccgtccgggcttcttcccccgcccttaaactgggattccgcaattttcccatggaccgtttcggcgtgcgttcccggcatctgaaagccctggcgcgaactccggatattcctgaagttgccgggaacaggttggagaaacgggaaacggtgctggtgaagaaactgggggcggaagtgaggatagcggagggcgaaggggatttgtctgtctttgggctgatgccggaggatctgggccgggcgctggttattgtcaaggtgcagaaggacggcccttgttcctctgccggcattctgcccggcgacgttcttctgatggcgggcgggaataaggtggatggagtggaaaagctcgaacgcctgctgccgtcttccggtaaattaaccgtaaccgtcaggagaaaccaggaaaatagaaaggtggatttgcagttttgaggatgcttctggcctccggaaaaagaggaagcggaaattacagaattccggtcaacttccggtaagtttccagggcaaaggaatccgtcattccggaaatataatcaagcatgtgcgccaggcgtgcagccttcccgccgttgttccggggtacgccggtaccctgaagcatgatggcgattttttgggattggccggaggatggatggttcacccattccataaagaagtcgatcaattctcccagtaccttataacccatggcttccacttcaataacctccctggcctggtacacattcttgatggcgtactggtacaagccgttcagcggggcggccagttccgagctgtctatcagggattgttccaaccttccttgcagcaggtcttcctcgtggttcacgaaactgtccacggcggactgaatgcttttgccgatggcgagcgcgcgcatataatggatgcaggaatctttttcctcttttgcttccagttcccggacataacagagctgggattccgtcaggaaagggctgaacaaatccttggtggaagcaaaatccagaagtccggaaaaatacccgtcctcaatatccgcaatgcggtaacagatatcatccgcagcttccatcaaatacgccaagggatggcggctccagcaaagatgtgctgcatcaggtgtggaacgcggaatcaaccccagatgtccagccatgaaagaagcagcttccctttcctgttccccgatgccgaatttcttgcattcaagcttgttggccgcaactatgctgcctttcttgacggcggaggaataagattgcgtacagggatatttcataaaggcgcccaaaacagccgccgtcagtttcaggccgttgccctccatcggatctcctgtacgtgtcaggatgcggaatccctgggcattcccttcaaaaggcagctccaggccgtgccgtttcagggcggtttcaatggcgtcttcaccggaatggccgaagggcggattgccgatgtcatgggccaggcaggcggtggaaacaatggtggcgacatcggaaggcatgataggagcgggcagggaccctttcttcgccagccactcccctgccagcatgccgagggaagaaccgatgtgggctacctccaggctatgcgtcaggcgtgtgcgcacgtaatcgttgcggcccaggggaaaaacctgtgttttgtcctgaaggcggcggaaagcactggaaaacagaatacggccgtaatcccggtcataattgctgcggtttttctgtggagatgccgtactccgatgcctggatccccagcgcgcgtccgacaaaagctgctgccaattcatcatccctgacatggtaaggaaatgctacaggggaatacccggatgtaacaggagaaaaatagagagggagttcaataggtcagcatcagccccacgccccagtgcaggttcttgtcgtaattggtggaaacgctgaggtgtgaggtcaggatgtagtgtaggcccacggaataatcccggtccgtattcagggaaaaggaaaggcgcaggcgggaggtgagcgggatatcgtcccgctccaattgcaggcgcacctttccgtccgtgtcaatgcgcgcatccgcaatcaggagcaggggcagcgtgtaccgggcgcccagggtgccgtccatttcccggtcctttttggtggtctgtcggaacatgttgcgttctccggcctcccccttgcggcaagtccagtccgccccgatgtaggggtaaagccattgcttctccccgatatacctgcccagcctcccttccgcctcataaccccgcgtatccttgtagcctattttccactctccctgcatgctccaccgggtgcccccgaattccaggttccctatgttcccgttggtggcgaaatcattgttcacgctcaggtaccatttccggtccatgtcgtaaacatgctgaagtgcctgcatggggtggggaagctgaggattggggggagaatcctcatacgtaaaaatccggcccatgccgctcatcatgtggtacaggatatggcagtggaaaaaccagttgccgcgcgttttctccgcagcgttaaactcaatcacctgggtgtccatgggctggatatccgctgtaaacttgagcggagaaaaatccccatgcctgttcaccagccggaaaaaatgcccgtgcagatgcatgggatgcctcatcatggtattgttggtcaggattatgcgcacattctgcccttccctgatcatgatccggtccgtctcggaaagagttttcccgttaatgctccatacgtaacggttcatattaccggtcagcatgaaatgcaattccttaacgggcacgccggaaggaagagtggtgcgggaaggggacttcagcatgtcatacgtcagggtggttccttctccgtcctcctgcatgttgccgtgtcctcccccatgggaggaaccggacttcatgtccattatctccatatttccggaatgggcggtcggcatgccgtgatgatgcatcttcatatttcctcccatggtcatcatcccgttcatttgcttcatctttttgaagtaattcagcttgggaaaggggcgcaaaggctgcctttccccatggcccagccacagggaggaagacccggaagtatcctctgccgtcgcctggaactcaaaggccttgcctgattccggcacttccaagatgacgtcgtaagtttcggaaaccgcgattatcatgcggtccacgtcaacgggaacaacgtctttcccgtcgctggccaccacgcgtattttcccgcccgcatacctcagccagaaataggtggaggatgctccgttgacgatgcgcagcctgatgcggtcgccgcccctcagccggggcagggaagcccgcgggatgccgttgagcagaaaacattcataatacacgtcactcacatccatggcgttcatgcgcttccattcgcttaacagcttggttgccatgcagccggagcgcagggcctcccaatagctctgtacactccccttgcggatggaaaaccagtcggagcccgtgtgaagcattctgttcacctcctggggattctcgttcgtccagtcgctcagtaccagcgtatattccggcagggcgtcctccgtcctgcgtgccgggtcatcgggccgtttgcggacgatgaacgctccgtacaggccgctctgctcctgaaaaccgctgtgggaatggtaccagtacgtgccgttctggatgatgggaaaagtataggtatgcgtagtgtggggcttgacaggagcggaagtcaggtacggaactccatcctggtcattgggcaccagcaagccgtgccaatggaaggaagtctgcgtgtccatcaggttatgcacccgtattaccgcagtatctccctctgtaaaatgcaatgtggggccgggaatgctcccattgatggtcatggcctggcgcgtggctccggtaaaattgacgggagcgttccggacatataaatcgtattctaccgtttttgccagagaaggggagaagagtatcggcaagcagcacaggaatggaagaaaatggaaggttcgtgtgaacatgaatgggaaaaagcactgccaggaaagacctgcctcttgaatttccagttcaaaatgaaacggatgtgatgtgtcatgcccacccttggccaaatctgctaaatggcggggcctccaattcggacggaatagggcgtctggaatttattttatgcgtcgttttttaaggaaatagggacgatcaggaaagaggccaggataagcaggcagccgatggacagaaggaacatgttggaatgctccctgaacagtagcagggaagtcatggccgccaggggaatcttgagattgttcataatcgccagctttacgggagttacccggcgcgcgccgtaattccacaggaaaaaacagactcctgaagcgatgacgcccaaataggccagcagccaccattgcacggttgaaatcccctgccagcaggccagtcctgacggcaggccggaaggcaaagtaaccagcagggagcctgcataggcataggcgaagcaggatgcttcgcttctcccgaaccaggaatttttcagggaaatgtaggctatctgacctgccgcgaagcagaggttggaaagctggaccagaacgattcctgtcaactccccgttaccggaggaatatcctttccagaggattcccgcccctcccatggctgcaagaatagccgccgccagatggagcggcggaagattctttttcatcaggccgtcaatcagaaccacataaatcggcgtggtggctgtaaaaagggcaacctggtgggaaggcagatagtggaaggcagcgatatagaaaagatacatccctccgaactggacggcgcctatccccatcatccccacggcatggctgaggggcgccttccggacgaaggggagaaaaacggcaaatgaaccggccatgcgtgccagtgcgacaaagctggcgggaagtccggacaggcaattccccagcagtccgaatgacaacgcccaaatgaaagacgtgagcagcaacgcaggcatgcgggcggaagcatatggagaaaggaaaaccaagtcaatccccacggcgcagagcatatagtcgggaacatgcaagattacccaaaaaacggggtaagataatggttctaaacataaaaacaccccgaaatattgaattccggggtgttcaggaaaatggtacgcggtactggtttcgaaccagtgaccccatgcgtgtgaagcatgtgctctaccactgagctaaccgcgcgtttgcagtgcggaaggaatatatcgttcgtgcctgggattggcaaggagttttttgaaatcgggtaaaaaaggattccgcttttccgccgtcaacaagttcccggaggaatgaccggtgtacagtttctccgagggacggtttggaaaagtggaaaggtggcttaattccggcttgtacagcatcaaccgtcttcctacactccgggcatgagttgcacaagccctcccagagcatgggcccagattgataccaatgcgttgaggcacaatttaaacgtcgtccggcgcgtcatgccggatcaccgtctgatggctattgtgaaggcggaggcttatggccacggtctggaaggggtggtgaaggccctggatggcgaagattgcgcttttttcggcgttgccacggtggcggaggcctgccgggtgagggatgccggggcaaaaacatgcccgtttattctcggcccctgttttgagggggagcgggaggaaatcgtgcagaacggctggcgcgccgctctttccagcatggaagaggcggagcatttcaattccctgggcgccctttacggcaaaaccgtccatgtccatttgggcgtggataccggcatggggcgcagcggttttttaccgagtgaattgcacggcctgacggacaagctcaaacagttcagttatctggatctggagggcgtgttttcccatttatccgcagcttccgatgatatttccttcacccacggacagatcagcggctttacggaagccgtaaatgaactttcccaaggccatcggtacaagttccggcacctgtgcagcagcgccgctgtgtttaattacaaggttccctgcgccaatatggcgaggctgggcagaatcctgtacgggtattcccccatgccgtctccctataataaggagctgcggcctacaatgaccctgtacagccgcattactctgatacgcacgctgccgggaaatcacggcgtttcctacaaccactgctatataacgaaggggagcacgaaggtggccactatcggcatcggttatgcggacggctatcttcaatatctgtccaaccagggagcgagggtgtatatcaatggccagtactgtccggttttgggccgtgtgacgatggaccagatcatggtggacgttacttacatggaccatgtggagaccggagacctggtggaaatcatggggcctaatgtaagctgggaggaactgacgcgccgtgccaataccatccccagcaatgtgctgaccagcatcagcgcccgcgtgccccggatttacgtgtaggataatgccgggggcatggtgattaaaagctgttgcccgccgcccggaaaaaaatcaggggatttatttgcagatatgtttttccccggcggacacggataaacgttttaccgtaccttttaccgctggcggattctattccagtcttccggctccagagcgcagggatcaggggctacccagtggcccggttctatttccacaggggtaaggtccgctcccaccgtctccggataggaggggtgctggatgcgatggccgaaagcagagccgagcggcgggttgatgggagaggggacgtctcccggcagaggctggtgcttgttggccctggaggggtctggttccggaatagcgtccagaagagccttggtgtaagcatgtttgggggattgatagatggtttccgcatctgacatttccacgattttacccagatacatgaccgccacgcggtcggagatgtgtttgacgaccgccagatcatgggcaataaacaggtaagagagtttgcgttcctcctgaagttccagcagcaggttgagcacctgggactggacggatacgtcaagggcggagacgggttcgtccagaataatgaggctgggatttaacgtcagggcgcgggcgatgccgatgcgctggcgttgcccgcctgagaattcaaaggggaagcggtcaatagcgctgtccggcaaccctacgcggtccagcaggccgcgcacccattcccggcgcgcggcgggggtgcccatgcggtggatgacaaagggttccgctacgatttgaccgatggattgcctctggttgagggattccgcagggtcctggaagaccatctggatgtgcggacgcagaggcctcattttgcgctgggagagtctggcgatattgttgccgttgaaccggatggagcccccggtgggtttcagcaggcggacaatgcttttgccaatggttgattttccgcagccggattcccccaccaggcccagcgtttcccccgggtaaatattgaaggaaacgtcgtccacagccttgacccatcccgcttgccgcaggaaaattccggagcggacggggaagtacattttcaaattgtctacttgcaagagaggttccggcatggctggtagaaaaagaagttaaaggttggcgcaacgggggcaggcttccacgaagtggtccggggatatttccacgaggggagggcgttccgtgagttcttccgcgggcacaccctgcctttggcagaagcggcatccgggaacgaaatccgcaatagaggccacctgaccgggaatggtgggcagtttggttttccgcacggaacttagctgagggatggaggccagcagtcccttggtgtaagcatggcgggggttggcaaaaagttcccggacaggggccttttccaccacgcggccagcgtacatgacgactacggagtcacagctctgtgcgatgacgcccaggtcatgtgtaatgaggatggaggatgaccccatttccgcctgaaggtctttgagcagggacaggatttgagcctgaacggtgacatccagggccgtagtaggttcatccgcaatgatgagttccggatggcaggccagggcaatggctatgacgacgcgctggcgcatgccgccggagagctgatgaggaaattcgtccacacgctgttccggggcggggatacgaacgcgctgcaggagctggatggctgcgtcccgggcttccctggtgttcattccccggtggagcatcagggattccccaatttgcctgccgatgctgtgtacgggattgagcgccgtcattggttcctggaaaatgacgccgatatggcggccgcggatgccgtgcatgtccgtctcttttgcctgaaccaggtcgcggcccttgaacagaatttgcccgtccaaaattttccccatgggctggggcagcagccggacgatggacatggccgtaacgcttttgccgcagcctgattcccctacgatgcctacgcaggtacctttggggacggtgaagctgacgccgtccaccgctttcaacaggccggattccgtttcgaagccggtgaccaggttcttgatttccaacaggggatcgctcatgtgttatttttccgtggcagaaggttccagagggtcgccgctttccgggatgacaggcacagacggcagcttgccgccgccatccttgttatccaggctttcaatggagtccatgtagcggtactggtcatacacggtatccacttcctcgaatgtttttccttcccgcttggcttccattgtttcctttttgatatcgttatccacccagtacagataactttccatgggatcaaatacgacgggatggcagaattgcgtagttgcactgttcggccatttgacccagcgccagtaacccagtctgatgaattccgtggtccagcaaggaacccacagggcttcgtcatcaattttctgctgcactttccacgtggccttttggagttcgtcttccgtggctgcgtttgtttctgcgtccagcagcttgtccatttctttgtccgcgtaagcgcagatgttattggtataggtaataaggcctccacgctcatcataggcgtaccgggagtggaacccctgctcgttcatcggatgggggggagtgaatccccaggccatgaaggaggcctgagcgcgtttttccatgattttgcggaaagctacggtggagtccagagggtcaagctggatttccaggccgcacttgcgcgcgtcttccttcagcttgcccagagtggaagccagggaaggagatgaattggggaaggtgatggctgcggtgagccgggtgccgtccggtttgcggaggatgccgtccgggcaggggatggtgtagcccgccctggcgaaataagcgcgggcctgttccggggaataggggcgcgccttaatataaggattggtgaatttgccgaaacctgaattgtaggaattgagccgctggtagtctccgcggaaggtaatgtcaatgatattctggatattaagtgcgtgctggaccccccggcgaacattgaggtcattgaagggggctttggaggtattcagaaaaactccgtaaggagggcgggggtaaatggtgtaaaatgtgctgcggttgatgtagccgttgtgaacctccggtatttccatgcgttcgtgccatagttccggtttggtgatgttcaaaacgtccagttctccaatgcggaagagttcgatggccttggatggttccgcaatgaaattgtacacgatttgatccacgttatacatgtatttcgtgaattttttgtccctggcccaccagtccggcacgcgctggagcgttacctggcggccgcggatgataccgtccggcttgacaacgtaagcgcccgtagtgggcggtatgcgccactggtagcgttccacgtagttggggccgaactcgcaataaaaatgcggcggggacggaatgaacagcgtgcaatagtacgggagcagaggtttggcgaaggggagtgtgatggaaaagcggctgtcgtcgtagatggtgatgttggaagcgttctggtaaaaaaagttgttgtagaatacgtcccggctgtattccgaagtgcggatatacatgttcaccaggaggtcgatggcctttaccttggctccgtccgtatagcgggcatccggatccagttcgaagtaaacagtgcgcctgtctggggattccgcccatttatgagcgattcctggaatgatttttcccgtaaccggatggatggaaacgaggccgatgatgatttcatcatacagggggccgcggaaaccgctgttgctgttcgggccgttgggccggaatgtgtcgggataggagccgggggcccactggcgcagcacgcctccttttttggcgttcgggtcccctatctccggattgtccagtccatcctcccacttcaggtcttgggggatgtccgccggggttttgaatttgatgtagtcgccttccgtctgcctgcggtgaatgacggacagggcggcttcatccgcaatgagcttgctttgcagtttttccctgactttagaatcttcctctttaaaaaacttgtcccggagctcccgtatttccttttgcttggcagcttcctcacgagccaggcggtcattgatctgtttgttccatcgttccgggaaggaatcaaatcccggtgggagtgtgccgaagggtacgttcggctgccagcctaccccctgggattgggaggaatccttgcaaccggacccggctgccagcagaagggacagcatcacggaagaaagggtggaacggaggagggtggacagcttaagcataagaaatggcaaagcgggagtctttttatttataagtggtgaattttttagggtcaaaggcttcgcggacagcctccccgataaaggtgacgagcaggagggtaatcaccagagcggaaaaggcggaggtaaccacccagctggcggaaagatccgccagtccgtcattgagcaggcgcccccagctggcgtatgtgtcaggaaggccgaagcccagatagtccagggaagccagagccagaatgagggcggaaacgctgaacggaaccagagtgaccagaatggcgaccaggttgggcaggatgtgaacgaagagaatacggctggtggaagccccaagcacgcgggcggccgccacgtagtcgcgcgctttttccttcatggtggaggttctgagctggtaggtcatggacatccacccgaacatgattagaaggctgataatcaggaacatgcccttcatatgaaggggaaccatatctgaaataatcatgatgatgaaaaggaagggaacctgggagaagatttcaatgaggcgctgcatgccgaggtcaaacatgccgccgaagtatcccatcatcattccaaaggtgatgccgatgaaatatacgataggcaggtagaagagtgcggctttcatatttacctggaggccgccgtacagataagccagaatgtccgccccctgggtattggtgccaagcaggtggccccccttgaggggcggggaggggtggtagaagatacggctgattttatgttcatccgtctgtttcaggaattcctctttggtgccggggccgctgtaatgttccgccacaatgttgttgttttcatacgtggcgctgtacacctccgttctgtcttccagccagccggtggcccggtccactttctttcccttgcggaatttgtagctgatgtggggaagggcttcttcatccttatgcaaacgggaggccaacccggaatacggcttgccaccggcctcgcagacgagaccgtcttcattcaccatcaaagcttccgaaccggggttggtggaatctcccgtgggatcgtatggaaccagaggcatgatgacaagggagggttttcccggctggcctgcctgttttttcagttcgcggtagttggcttccgcatccgcaaaatctccggtctggccaaatgtagaacccttgtatactttgcgcatcatggccggaaagtaccaggagccgtcctgaacgacaaggagggcccgcttgcccaccaggcactggtccatacaggccaatagcgtcaatacaagcaaaatgaggagggatacgtagccgcgggagatgcttttaaaacgctggatgcggcgcctggtgatcggcgttggatggaacctccgggggcctttcagcatgagccagaaaccgaggcctcccatgaccagcacgcaaacccagccgaaccacaggaatttcccctgaggcgtcagaaagccgccgttgttctggtccgtacagacgatgttgagcatgctcatttcccgtgagacggtgaagggccagcttaacgtgggcaggagcagcccgcacagctctcccacggcagtaagaaccgccagaatgaccaaaaggtatgccagttttctaaccatgtgtattattcaaatttgatgcgcggatccacagcggccacgatgatatcggagagaaggttgcccagcaccatcaggaaggaggtaagcagcagcgttcccatgatcagggcgtaatccttgtccatcagagcctggtaactcagcatcccgaacccctggatatcgaaaaccttttccaccagcatggagccggccacaatcaggctgatgaggctgcccagagtggaggcaatgggtataaaggagttgcggaaggcatgcttgatgacggcccctctgaaactcacgcccttggccatggctgtcctgatgtagtccgcggaaagattgtccatcaggttgtttttcatcatcatggtggtgatggcaaaggaacttactacataacaaatcagggggagcaccgtatggtgcagcaggtctccggcctgttgccagaaccccatgtccgcaaagtccggagacgtaagcccgcagagagggaaccattccagccgcgcgcccagatacaccaccagtacggcgcccagggcgaacccaggcacggagtaccccaggaaaatcaggacggaagagatattgtccaccaggcttttatggcggattgcctttactaccccaaggggaatgcagacggaataggtaataatggcgctcaggatgccgaagtacagggaaacgggaatgcgctccttgatcatgtcccatacgggttcattgtacttaaacgaattgcccatagttccctggagcagcccgtcaaagctggtcttgtacattacggcacgccaggcatagccccgagccttgtcgcggacggcctccgtattatccgtctgcctcatgcggcgcgcccagcgttccgcgcggtccatgggggattctatatccacggtccagccttctgaagcggctttccgggacggtgtgccggaaaagaaagcatctttcacgctgccggaatccttgtcctggcgaactacgacgacttgttctcctgtttcattcagattgatccgtgtatgcgtatcggaaatgccggaatattcatcttccttgtctccctctcccgctccgccgatttccccgaattcctcacgggaaatgaaaatctttttgggcagcacgcccagccattgcagataagccgtgatgatgggctcctgcaggctgtactgctcttccagccgctccatatccgcttcactcaggttattgtcgccgcgctgggagccggctttctgtccggacagggcgctcatgctttgctgctgcatcatctgctcaatgggacctcccggaacaaaacgggttatgcaaaagacgagaaacgtaacccccaggagcgtcaagggcatgagaaggagtcgtctgatgatataggtcttcattcgtcgcgctgaactctaccgatttgtggaaggtgaggcaagtagcaatgcaaatttgtaagcctttgctaacataaggcgctgcccggttcttcttaagatgaaagggaaacaatgcaatacggcaggtttcctttcttttgacaggcctttcgggaggggtggactattacattccttctcccaaccggcgcgccagcatgtccggaagaccggcggccagaatgcgtctttgggcctccgctacatcgtattccacgcggcgctggtagtacaccatgctgtcttcgtcaagcacgccgtaggcggcgcggggatcgccgtctctgggctggcctacggagcccacattaatcagatatttgttggttttgagtagctggatatccccggattcatattcatggatgcttccttcatggcggatgaatgtacgggggacgtgagtgtgtccgttaaagcacaggaattgattgtcacgcagcatattaatgctgtgggtggccgtatccacattcgtgacgtaggcccaggagttgggcttgtcctgtgtagcgtgcaccagaacgatttcattggggagaatgcgctggaaaggagcgcggcgaagccactttttctgttcttcggaaagttgctgccgcgtccacatcagggcattgtaagctactgggttcatccctgccggattgtcttctccaatggcttcctcatcatggttgccgcgcacggtgggaatctggcggctgcggatgaattcaaggcattcggacggattggcgttatagcccacaacatcgcccaggcagtaaacggcattgcattgaagctgttctatatccttcatcaccgcttccagagcgggcagattggcatggatgtcactaatcagggctattctactcatggtattgtaagcaaagagtatagcactttgaggaggttttgccaagcgcgtttgctcacaggaaaccatggttggggcacagggtgccggccttcccatgaccccttatttccgtctgtttgctttactcgtcttttgccggaggcaaagattccagggcttctctcagcccgtctactggatatttcagggaattggccagatggctggtcatcaggtcacgggcgatctcatccgtgggaaacagttctcggaaggggatgcgttccttttccggtatgttcagcctgttttccagaacaaaaatattactcaccaggctgggtgtcctgttgcggggatccttgaatagctcccggcccagttccagagcttctctggatttggaaggcacacggacgagcgcataaaattcttttcgggccgtaaggggaggcgctcccaaatcccgtgccttgcggtaggcttccgccgccttttcaaagtccggttgccggtaggtatcgctatacatgttgcccagcagggattgaaggtaccagctgtcaggattggcgttgatgcctttttccaggaagcggcgccccttttgaatgtatttgcggaagccttcccggcgttccatgggagaaagacgtttattgtccagataactggaggaagcgttattgcccaaatgccacgatccgttgtcccagtaaaaatcggagtgaggagcgagagaggtaacctggttgtagcggcgttccaggttggcccagtcggaaatcaggaaacagtcgaaagcttccatgctcagcacggccgccaccagggagcggagccctcccagggagaccatggcaagttgttgttccagataatcggaagaggaaagctctaccggattatccagcagcccctccgccttctcctgttccagaatatgattctgcaaaggcaggcgaatcatgccgaagcccagcagggcaatgatgaaaatgacgatggtcttcagcatgattcgcaattggttcgagttaattcatgttcaggcgcttgcggatggccttgtccagaagttcccattccggcacggaggctccggcttgccgggccttggagagagggtctccccagatagccgtgtattcgacggggcggccttcgttgtagtccacggcgctggacgggatgaaagcccccatggtttccgtacgggaaaggtggaattcaaccaaatcttccggcagggcgtagccgcgggccctggctgcctgtactacttcttccatgatgcggcgcgcgcgtacgacgttttccggattttggtagagttctgcaatgctgatgccgcccagagccaggcaaagcccgttaaacgggatgttccagacgagtttgtaccactggatttgctctgcggcgtcaaaggcgcgcgttttgatgccggcattggcaaacagctcggagagttccctggctttttcagtcccttccggcgtgggaatgaagggggcgaattggatgttgcccccttccagatggttgacatggcccggtttttcccgcatagcgcagatgaagcacaggcccacatagatacggtccgccgggatgatgcgggcaatttcctccgcatttcccatgccgttctggagtgtaaccacagttgtgtccggccccatcaacgggggaagggctctggaaaatccggcgtttgccgtgcttttccatgcaacgacaacgaggtctaccgggccgacttcctccgtgtcccggtaaacgttgatgcggggcagggagatattcccatgcaggcttttcacctgaaggccgtgttctttcagatagccgtattccgaacgtacgatgaaggatacgtcctgccccgattcctgaagtctggctccgtaatagcaacccagggctccggctcccagaatggcgattttcatggcgtgcggcgcggttagtgatatttttcagagcccctggacgttgcccttgttatccaggtagatgtgcatggcgttcggtgagacgggaagggcgggcatgcgcatgatttccccgcagagggccaccaggaagccggccccgttggcgatttcaaagtcgcgcacggtgatggtgaagccggtgggacgtcctcggaggcgtccgttgtcggaaagggagttctgggtttttgccatgcagatgggaaggtccgtcaggcggctggcttcaaactgggccagcttctttttggcggcggctgtcaattccacaccgtccgccccgtaaatgttgcgggcaatgatgttgagtttttcttccaccggcagggcggattcatagaggggcttgaaaggggcggaactcctgtccgcagcttccacaaccatttgggccaggtctttgcctccttctcctccctgggagaagatatccgcaatggcgcagggaataccgcgttccgcgcagtgtttcacgatagcgtccagttcttcccgggagtcgtcaaagaatttgttgacggcgaccacaacggggcgtttgtagtgggcggcagcgtccagatgcgcatccaggttggcaaggccttttttcaacgcgtccacatccgtgtttttcagatccgcaagggcagttcccccgtgcatttttagcgcgcgtgccgtagctacgatgacaatggccgccggatccagtccggactggcggcatttgatatccaggaatttctctgcacccaggtcaaacgcgaatccggcttccgtgacggcatagtccccaaaatgcagggccatcctggtggccagcacggagttgcagccgtgggcaatgttggcaaacgggccgccgtgcaggaaacagggcactccttccacggattggaccagattgggcatcagggcatctttcagcagggccatgacggaaccggtaatgcccagttcccttgcgaatacgggcttgtcatccgtcgtgaatccgatcacgatgcggttgatgcgttcttccatgtccttgtaggaagtggcaaggcacaggcacgccatgatttccgaagccggggtgatatcgaagcctgtctctcgggggaacccctgcttgttgagccccacgatgatggaacgcagggaacggtcgttcatgtccatgacccgcttccatatgactttgcgttcgtcaatgttcagcgtgtggaagaacatggcgttatcaatgatggcgctgatgaggttgtgggcagatgtaatggcgtggaagtcccctgtgaaatgcatgttgatttcctctgccggcgtcagggagcttttgccgcctccggtagctccgcccttgcggccgaacaccggtcccatggaaggttgccggagcgccaggcagacttttttgccgatggcctgcaatccctgcgccaagccgatggaaacggtggttttgccttctccggatggggtgggagtgatggcggataccaggatgagtttgccgggggctgccggcttgtccaatacgtccagggaaattttggccttgttgcggccgaagggaatgacgtctttttcatcgacgcccagcttgttgatacagtcggagaatgcaggtgtaaccatgcgcacatgatgacggaagccccctcttttggcaagaaggttcatgggcattccggaccggatgaatcaatgagcgggaaagggccgccttcttcctgtcccgcgacattccccggatatccatgcaactccgggagaacctccggaaatacccggtatggcaggttacgctaagacgggggtaagaatcagggttgcgctttctgtttcctctcagccagcacgggacggtagtggcccgtgatggtgtgggaaaacaggaagtcttcttcctgcgttccggcgccgacattatgaatgatcagcggcgtgccttcctccgttttccggtcggaaacgatgccaatgtggggaatactatcggacaggttccatgtaaccaggtcgccgggctcgtagtccgccgcgttttccgtaatgggaacggaccaaccttttctggcaaagaaggtacgaagattagggaccctgcggtggtcaatgctgcggtccgtcgttttcaagccccatattttagggtatttggaaaagtgggccttcatgtcctcatgcacggctttttgaaggtccaggccgaaggccctcatggcgcggatgaccacatccgtgcatactcccgtttcgcggggaacgtctccgttggggtaggggatggattgatagcctccgttgtaggaaaccgttactcctacctgttcacgcgccctggccgccagcgcggcgttgtccgccatcaggcatgcagggcaggaaagaaacaggaggatgagaagggccgccggtttcatagggcagatggggagggaaacgcggaaaaatcagacgaagctggcaaagccgatgtccggccggcgctgcatgccgttaaattgaatctttttgatttcgttgtgggcacgctggcgcgcttcggagagggtatctccctgtgccacgacggctaggacgcggccgccattggtttcataacagtttttatccgcattccatttggtgccggcgtggtaaacggaagcatttgaaatatcgtccagtccctgaatagcgtcgccggaatgggaggtctccggatatcctttggaggccagcacgcagcagacgctccagccgttttggaaggaaatttcttccggcgcaaattctcccttggccccatgcaggcagaaggaagccaagtctccggagagcaggggcataacggcctggcattccggatcgccgaagcggcagttgtattcaattacttttgggccgtttggagtcaacatcaggccgaagtacagaaaaccccggtaaggcagcccgtcttttttcagtccggctaccgtcggagccacgatttccttttcaatgcgttccagcatttccggctccaccagccggcgggaagccaccgctcccatgccgcccgtgttggggcctgcatcgccttccttgaggcgtttgtagtcccgtgccgggcagaggatgagataatggtcgtccaccagagcgccgaagatggaaacttccggtccggtaagaaattcttccaccagcagccgcccttcaccaaagcgtctgtccgtaaatacttctttcaggaaagagtctgcttcctccttgctcatgcagacggctacgccctttccggcggccagaccgtcaaatttcagcacggtaggatagttgtttccgatgaattgccgggcttcctccaatgtggccgctacgcgcgcctgcccggtagggatgcggtggcggagcaggaagtccttggcaaattccttgctggcttccagctgggcgctttcttttaccggcccccagcaggggatgcccgcacgggagcaggcattggccaggccttcatccttgaccagatagctttcctccccggcaacgcagagatccattttattggaaaccatccagtcgatcagcgagggcagatccctggccgggatgggggtagccagacggttgatggcgtcacttcccgggaaacagtacatttccggagcggagggagattccttgagtgccttgaccagtgcatgttcacgtccaccttttccaataacggctattttcatacgccgccagtatgccgggacggactgattttgccaagctgaaatgaacggtgaggttttcccttttgtccggttgttcccatgcttttcctccattgccgggaatggggttgtaccactttttcttttcgtggcacggcgcagccattccgttcggggaagatgatgtaaaaaggccgcctgacccggaggaaaggcggcctgtaaaaggaaagggtggtatttgcgtttagaacgggatttcgtcgtccatgtctccgaagtcgttggacggctgattggtggggggcatggggggcgggttgtagttctgggccgggcgggattgtccgtagttgttggaacggggagcattctggtactgctggcgcggagcacctcccatatcgccttcaccgccgcgggggaagagctggatgttttccccaatcacgcgcagcttggtgcgtttctgcccggaggctttatcttcccaggaatccagttgaaggcgtccttccacaaagactccgcggcccttgctgaggtagttgccggcaacttccgcctggcggttccaaagggtgacgtccacgaaagtggtttcttcctggcgttcgctgttgtcgcccgcgtagtaacggttgatggcaaggcggatgtccgtaacggcggttcctttgggagtgtagcgcagttcgggatcagcggtaaggttgcccattaagaagactttgttgagattggccatataggatgggtgttaacgaggtgtatggtatataggaaaagggccttgccgtttaggaggaaggcatgtgtttggtcgctagcaagtatgggcctgcacatggtcttgtgcaatactaaattacggaatcgtccttcatcatgtctcctttctacattgcattcgtcatggaaccgtgaaaactttacctccatgagtttcaggcagcggcggagaaacggactgttccgggtttcctggggcacatgccttttgctgtctgtgctggcacacctgtttttgctggcggggagctgcctggttcctgaagaatggctggcttccccacgtccggctgaagcggcgcggaggaaagtggctgtaagcgcgcgcatggtaaagaaagtggaacctcaactggagagccggagacaagagcccgcggaatatctgcctgccgtcgtgaagaccaatgaggagcaggaaagcgccaccaggccggaagtgcccaaattccagagcaacaggaacacgcgggcggaaggcggccggaaggatccggacggcgacagggatatgcccgcccaggatggcgtggaacgggaaaacggagagattgtcctttttaaccaggaaaggcaggatggggatttaagccatgaacgggacggcaacaaaaacgcctcccccggagcttcttccaatgttccctaccagcccctggaaccatccatgccgcctgccggtcatcccggttccctggctcattctcccgtcaagaagggagagccaggcaaatcggaagaggaaaaaacggcccgacaaaacatccgtcatgcacaggagaaggccatgcagcttccccatgcggtagtgttgcccagccccggagattcggagaagccggatccgcttgaggaattggccaaaagcattgcgaaaggggcggacaatcctcccctaaatcttcccaatctggatttggtgcccaatacaaaaccggttcagaaacagcccttgtatgatcccatgttcaatgcggagagccagcccggcttcaagacacatgagcggaagaccaagcaggtcggcaaattcagctttggccgccgtccgacattggatgtggaagctacgcccatgggaacgtaccaggcgatcgtttaccgggctatcggggaacaatggtaccgccagtgcgatttgaaccgcgacctgattgttaccggaactgtgcgcatccgcatcctgattaacaagaatggcaaaatttcgtctatgaggcagacttcccgcgtgggagccagcgaggtacagaagtcctttaccttcctcgccatcaaactcgccaggcttccagcgatgcccccggaggtaaggagtatgcttgtgggggattctttggaaatgtatttcgatttcaatttttaacaacctaccatcctgcaacaaataccattcacagatatatgatgatgaacttgatcaaagactgcattacattcttccaggcaggcggcgttttcatgtacccgctggcagcctgttccgttcttcttattgcggccgttatttaccgcatgttcaatatgaagaagagcctcatttgccccgtcgtgctgaccagggccgtggagcagtacacccgcggcgccgtggagcgcactgaattggagagaatagctgcggattcggattccgtggagggccgcctggtgctggatgcgttgaattcaccgctggaggatgaagcctccctgaaggaaatgatccaggtgaaggcccgcgaggagtttgtaacgcttcaggcgggtctgcccctgctggacatgattgtgatgatagcccccatgtttggcatcctgggaaccgccagcggcctggtgcagattttcagcgttttcggaatggatgagagtcacggcatgattgctcaggggattgcccaggctctgaatacgacgattgccggtctcgccatcgccactccggccgtgattgcccacgtttattattcccgcaagctggagcgcatttccgcctccatggaagtcctgctgacagaactggtttccttccgctgccatcattcccaacgctgacaaggccatgcagttttaccgcaagaaagcaaggagcatgggggtgcccatcgtccccatgattgatatattgaccattctgctgatttttttcattgtccatacgcagtggaagaagccgcagtccctgcttaagatagatgtacccggagcggaattcatggaagggactccgtcttcggaacagcgggccgttttggccgtgacggggacatccgccatttccctgaatggcaggctggtggagatgaatgaactggctgctgccctggaggccttgaaaaaggaaaatccgggcgtcaaactgcagcttgacgtggataaaaaagcggagttcggcgtcattgtcggcatttgggatgcgctgacgtctgtgggtattgacgcaggagaggttcctgccagaatagaaatcaacaagcccggcgcacggtaagcgccttaacatatatattatccccctcccgatgttattggaaatagcacagtatggaaatccggtattgaaggaaaaatgccgccctgtagaacattttgacgacagcctgaaaaccctggcggagaatatgctggaaaccatgtacgcagcagagggcattggcctggcggctccccaggtgagcattcccattcaactggtagtgattgatatcccgaaggaggaagagtccgtcacctggcttaaagtgaacggagaggacaaggagctttccgacatcatgcctttgatgtttgccaatcctgttctggaaccttacggacccatgcatccttttcatgaaggctgccttagcgtgatgaagatacgcgcttccgtcgtgaggccggactttgtcaaggctacggtgcttctgattgacggaagggaaataacgattgactgcaacggccttctggccagatgcctgcagcatgaatgcgaccatttgaacggcatcctttttgtggagcgcgtttcttccgcacagaagattaccctgcgcaacaaattgaagcgtctggcattgggatactagctttccgtgacttccctcaggcctttatggcagccaaaggaggggggcaaagaagaccgcattccggaaccgcaaagtttttacagccgggaaccgtcccgtgatgttcccggcagactataatccacccgggttcgcagtattcggaagagaagaggtcaggacgctttttccggatccggctgaaccggttttccagattcccttttgacgcgtatttgcaaatccgccaaagcgttcatgtagtaaatgtacgcgtcaaaggcggatgcatacggcgtgaaggagttttccttctgcatataatggaagtggtccgcactctgcagtttgcgccaaacgtgggtaagatccttgtcatgggctgccttgaccggtttttccagacggtagattttgcggagggcttcatcctgcatgacgttgccattccaatgggacatggttccaaaagtggagcaggtcatttcctgggtgcattcacagacggaaacaggtttgatttcccgcgccacttcggacggagtcatgaaccggttgccggcgtctatgcaggcgagaatcatcgtacgccagaattcgaagacgcctgtagcgtcagactggcgttcccccagcgtttcatagtccatggacagggtagtgacgcttccctgctggtgcgtcagccaatccgcgaaagtggtgggggaaagcgggtattccgaccattccggatcagtccgcatgattgccaggtcattggagagttcccggttgcggaaaatggtggtggtgttatacacccacggagccaagaagacttcattgctggtgaatcccttgagcatggccgggttgccgtccgccatgatgcccttgaagccgagcgtttccgcctgcgccgcaatggcgttggagtacagcatgccggtattcatcagcacatccgtttcctgatggaagagttttttgagaagctcccggtgttcttcaatttgttcggcaaattcctgaggagagtaaacggaggccagggaattgtagtaaggcattgccagaaagtccacgcatccggtttccgccagatccttgaaagcggcaatcaggtccggcctgtggtacagggcctgttccagaatgactccgctgagcgccagtccaaaacggaatttgcccccggtgagttcaataagctgtttcatcagccgggttgccgggaagtaacagcgctccgccaccgtgctgagcacgcgggcattcagatcatcatcttcataaaaggcgtgttctccaattttgaagaagtcataatgaatcagccggttgggctgatgagccacgaaagtgagggaaatgttgctcatggacggaggggagagggctgagagttattaagtaaggtaaaaaggcgtttttagcggttcagcacatgttcataaacccggatgaccttgtccgcggcggcgtcccaagtggaggccttgatgtcctccgtgctctgttccactactttccggtacagttcctcatccgtgcagagatgaacgatatgctccgccattttgttgacgtcccagaagtcagctttcagggctcccttcatgacttccgctacgccggactgcttggaaatcacggcgggaatgttgaattgggccgcctccagagcagaaaggccgaatggctccgatacggaaggcatgcagtagatgtccgtgatggagaggagttcattgactttatccttgttcaggaaaccggtgaagtggaatttgtcgcccacgcccttgaaggctccggattcaatcaactggcggagtttttctcccgtaccggccatgacgaagcgtacgtcgtccgtctgttccagaaccttggcggcaatctgaaggaagaatcccggacctttctgcgccgtcaggcgacccaggaagagcacgagtttttccgggaattttttcttgcctttgaagactttgaccggatccgcgccgttgtgaatgggaaatatcttatgggggtcaatggcatagtgcccgctggcgatggttcccgtgtatttgctgaccgggataacggcattcgcctgttccatgccgaatttttcaatgtcgtaaatccagccgcgggcatccgctccggcccggtcaaactgggaagcgtgcaggtgcaccaccaggggcttgcccgtggcttttttcacttccacgccagccaggtaggtcagccagtcgtgggcgtggataatgtcaaaatcctgctggagggcgacttttaccgctatttttgagaattgaatgactttcagggccaggtctccggcgtaaaggtcttccttgttcctgaacagctggaggtcggcttcatgcgttttggagaaggtgatgcggccttccttggtgaactgcaccacgccggattccccttccacggtggtgtaggggtccagttcaatgggcgcgcgctccaccagggcaaagctgtcataagaatatttccggtccacttgctccacttcccgataggagacgttattgagaccggtgagctgaaatccgtcaaaaatgacggaagggtcggccttgggaacgatcacccttaaatccactttttttgccagcgccttggaaagacccaggcaggcaatgcccaaccccccgttgaccaggggcgggaattcccatcctaatgtaagaactcgaattgtgctcatcggttgatgtggtttgtcggtgccgggaaggatacggactcgtgccgtgttgtacaccaacgcaataaaaccagatttttcatgttcggtctagattaatatgaataattttactctaataatgaaaagaaaagtgctgctttagttcaatcttgcgttcgtcatgaaattgatttagtctggactgaacgcttttgatcctctcttccgtccggcttcaatgtgctccgtttccaacatccctgaaagacgaaaaacacctcctctccgggggagtttcgtcaaatgggagtacacgaatacggtttccaaaataactctcagcgtgtgtcttgctgatgccggtattgtccgcgtaacgtatttccccggagcggtgccggaagacgagccgagttatgccgtaagccccggatattccgcgccgggagcggaaatccgcgagtatgatgaggccggggttcatgtcgttgagacgtccctgctccgcatccgcattcacacggaggagcaaaaggtggatttttacgatgttgccacggatgagcccctgctgacggatgagggcggattcggccgggagagcaaggactggactggagacgcccgggtatggatacggaaaaatcttcaggaaacggagcattttttcgggcttggggacaagccgtgcgccttgaacctgaggggcaagtatttctccatgtggggagcggaccattatgatttccatgaggagtcggatcccctttacaaaagtattccctttttcctcagtttgcgggaaaggaaggcgtacggcctattgtttgacaacacgtgccgttcgtatttcgacttcggagctacggatgaaaaggttctttccttcgggtccttcgggggcctgatgaattattatttcatttacgacaacactcctctggacatcatctccgcttatacgcgccttaccggtacgcctgaattgccgcctttgtgggcgctggggtaccaccagtccaagtggagctattatccggacaaggccgtatacaatctggtggagcgtttccggggcatgggcattccgtgcgatgccgtgcatctggaccatcattacatggaacggaaggagggatttacctgggacaaacagaattttcccgacgcggaaggaatggtccgcgccctggagaaggacggtgtgaagacggttctgattgtcaatcccggcgtgaaggtcaattccgccaatccggtctggaaagaggggatggaacgcaattatttctgccgccggtcggaaggcaatttattgtcggaggaagtatggccgggactttgcaatttcccggattttacggctcccgccgtacgcggctggtgggcggatctgttcagcagggatattgggaaaattggcgtgcgcggcctctggaacgacatgaacgaacctgtcgtttttccggaccgcactttcccgatggatacgcggcatgaatatgacggcatgccctgttcccatgaaaaggcccataatatttacgggcagtgcatggcggaagcctcctggctgggcatgaagcgtcacgctccggaccggcgccccttcctgctgtcccgatccggttttgccggattgcagcgctttgccgccacatggacaggggacaaccggtccagctgggaacatttgaagctggccaatttccagtgccagcggcttgcggcttccggcatttcctttgcgggagcggatgctgggggattcatggggcatcccacgccggaattgttttgccgctggatgcaaatggcttctttccacggttttttccgcaatcattcctccggggagttcggcggtcaggagccatgggtttttgggcaggaagtcacctcttacgtgaaagccgccatagagggccgctaccgcctgcttccctatatctacacgcagttccgccggtacgcggagacgggcatgcccgtgctgcgctccctggccctgcaatgttttaccaacaaggacacctactggcggggggcggagtatttctttggagaccatctgtacgtcattcccattcatgagccgcaggaaggcgggcggttcctctacattccggagggcgtctggtattcctaccacacggacagcctgatggaggacacaggaaaggatgtatgggtgaagtgccccctttctttcctgcccgtgtatgtccgcggaggggcggtaattccccattggccggtacagcaatacgtgggagaactgcctcggccgccgctgacgctggatgtatggtgggcgccggaaggggaggtggcttcccatttgtatgaagatgcaggggacggatatgcataccggaacggagaatgcgccgtgcatgggttcctttaccgcggcggcaccaattccctggagctggattggaactgcgaaggggatccctgtgcgttccatgagtccgcagaggtggttttgcacggtttgcctgcgggtatttccgtcagtgcatgcatggacggcgtgccgtgctgcggcgtgatgagggaaggaagggtgtggaaaataccggtgaaggataaatttgacacgctttccgtctgctggccggaggaataatgttcttccattaagggatgaggcgtccggaggaactgtcatggaaggtggaaactgcgcctgaccgtatccctcttcagtttcagttcccgccattcatgcgtcagggtggaggaggccactacgccgcccccggtgcagagtgcgagcctctgcccctgccagtacagggagcggatgcctaccaggcagaaaaagtctccatcttccagaaacccgaacggggcgccgaagtgaagcggacagcggagacgtgaacgccagtcgtccagctgggcgagcgtgttttccgtgcggggctgggaacccagggcgggggtggggtggagcagccgtatccagtgggccggagtatgctgttcgtccgattccagtgtgaggtaagtgacgaagtggatcagggtgcccaggttcagcacgctgcgtgccgttctggtgacgctgccgaagggggacaggcgggaaagaatgctgcccgccacgatttcatgctcgcggatttccttgtcgtcgttgatgaaaaccccttcatcctccggacgggccgttcctgccagggccattgtctccaggcggcggccctgctggtggaacagtgtttccggagtgattccgcagaatccttcccgttccgtccaccaggcgtagggataatgggacggagagctgctgatggcccgcaggatgagttcccggggtgtgtgtgggagcagcatttccccgaactgggggatcgccggaacgcttttcatcaattgcccggcagcgatttgctccatcatttccgcaaaaacctgcgcgtatgcgtccggagatggttccgcccaccggatttccggagcaggcgggggaggatttccctccgccgggagagcatgaagggctgccggtattttccatggccgcgggtcgtccagccggaatgtatcaatataaaaagcggggccggaatccggcggttccgctgattcccggaaaggcccggttccgagaagaaggccgcgggaagggtgcttgatcagggctccggaagtcagcgtttttatgtccatacgcaattcatgttaaaatgccgccgccgggaattccagctatttgaatgtttgtgaagtgcggaagaaacgggaatgacggttcagtgggcgcctccgtttttccagaatgtcccatggatggcatggacctgaaaaagggcattccccttcgtccctgacgctttttcctcctccgttgaaaaagcaggggatgacggcctttccctgcccggagcctgtaacggagaggaactccgcccctgtttcctggagccgtgcgccatgtcacgtgcgttccccttttgaattgacggggaaaagcactcaagtaagctctaaagagcttccgaccctatgcagataatgaacagaccagcaccatcagtccccaccgccgatattccggtagaggccatgctggcagaggtgcggaagccgctgggacccgtttggtggagcgtgtttctcgccagcgcattgctggcggcgtggggcatagggtggagttcctggcgtattgccgcagagggtgtgggcgtgctgggggtgaataataatgtggtgtgggggctggacatcgtgcattttgttttctggataggcctggggcatgcgggcaccctgatttccgccgtcctgctgctgacgtgccagtcatggagaagcccgattgcgcgcggagcggaacagatgaccctgtgcgcggttatctgcgccgccgttttccctgtggtgcacgtagggcgtgtctggatggcgtggatggcttccccgttgccggaagtgagcggaatttggccggacatggcctctcctttgatgtgggatgtcatggcagtcagcacctattttcttctttccctgttgtactggtatatcggcctggtgccggatttcgcgttgctgagggattgctgcaaggggcgtctgaggcgccggtacgggtggctggcactgggctggcaggggacggggcgccagtggcgcgcctatgaaaaggccagccttctttttgcggttattctgactcctctcgtggtatccgttcattccgtggtgagtttcgatttttccgtgactcaggtgccggggtggcaccagagcattttcccgccctatttcgtagggggggccatcctcagcggcatggcgatggttcagctgattctgctgggggtgaggcgtctgatggccggcagcggcgttcgccgggccgttactccggccattctggatttaagttcccggtttgtgctggccctgagcctggtgatgggagccatgtatttgtgggagcatctggcagccattctgaatggaggctctccggagccgtttccgggcagaaatcctgtgaatgccgtgttcctcatcgtcatggttgccgggaatgtggcgctgccccagttgttctggttccgctctctgcgaaccaaccgctgggtgatcgccgccgtggctctgggagtgcttgcgggcatgtggatggaacgtttctggattgtcgtgaattccctgaaggcatccctgctggctgccaacatcggagattatttccccagcgtgacggatttggccatgatggccgggagcgtggggctgtttatggccctgtacatggcgctggtgcgtgtggctccgttcttctccctgtgcgacgtgcgggaacagcaatccctgaacaaggagggcggggcatgaaaaagcccgtcatttccggctgggtgctttccttcggttcggagaaggcgctccttcaggccgtccgcgtgctggtgaaggaggaaaatctgcgctgggaggtttgcgcaccttatccctgcgccgctgttcgtcttgccaacaggcacgccgggaaggccgtgggagcaggcgtccggctgtgggccgcagcgggcggcgtctgcgggtttctggccgtggctctgtggctttactggacgcagttctgtgcggatccccttgtgacccagggcagggtccagggctgggacagctggcccgcatatgtccctcccctgtttgaaggaactttgctgggggccggattgctgaccgccgccggtttcctgaagggggctcttctcccgcagtggcacgactgggcgttcgagtgtgattttttcaggacggatgagcacgggaacggttacttcattctgctggaaggcgggagcgaaggccatgccgccgttttggctgaagccctgcatccggatgcccgcgagtacgttcatgggaaaggaggccgggcatgagaggaggcatcacggcggtagcagcccttgttctcctgggagcgctctggttcctggcaggggacgacgatggaagaaatgccgttccccgtttgtttgacaatatgaatgatcgtcctctggcggatgcccagcaggtggggatttcttccgccgccccggaccggaaaacgcgtttggcgcctccccgctccgtggcgcagtccctgggcatgaacggaacggtccgaaaacgggaggatgaccgggactcctttgctgcggaaggttcctatttttcctccggccgcatgcagggcggagaggaggattccatgcctctggaactgggcggcatctcccgcagccgcgacgtgctggcggaggggcgcgcgctttatctggcgcattgcgccgtttgccacggagaggacggaagcggacgcggaagcatggccgcttatgacacctatccgcaaataggccccttccgggatgaaaaatatgcttcctattcttccggaaaaatgttcaggagcattcggttggggcagggaaacatgcccgctttcggaaacattctcacggcgcgggaaatctggtgtctggtggcgtttatccgccatttgcaagcgccgccggaagaacctgccgttcaacaaaaggaacaacattcatgaacagcaatacatcttcaacaggcggggaacgccaggaccgtccgggattcggctgggccgggcgttccgctgccctttccctgtggatcatttccgttctattatggtgtgtgctgatgcgccagtcctttacggccatgccctgggacgacatgacggtagccggagaaaggttgcaggaattgagaaggccgttcgccgctgccggaatggccgtaggggtccttggctccagtctctgtctggggtgcctgttctggctctgcctgtcttcactgacgggttccggctggggcattgcgctgagaagggtgctggcggcgggttgctggggttttttacccggtgttttggtattggccggaacggtcggctgcctgactaccgtgatttttccggaagcagcccggtactggggagtggcggatgttgcctctcccggcgtccagcccttcggcgttctggatttggctgacttctcatggtggaacccggcatggctgtacgtgcgcgtggggagtattgcggcgctttcctggagcatggcccaggtatgggaaacgctggttgcggaaaaaaatgtctggacgccttccttccgccggggctctgccgccgtctgcatggtcatgacggtgatgatgctgggcctgctggggatggacatgctgggagggacgggaaaggtcgttctttccatgttccccgtatacatgattgcatatgttctgctggcgtccctggcattcgctgtgttgtctgccgtgttcctgaggcggctggacggagggaaggagctgccttggccccgcctgggcggcatgctgatggccatggttctggtgaaagcctatattgtgtattctcagtacatgattacctggtacgcctccattccggctgaaatgtccttttataacgcagccgcttcctccggctggtccggaatgtttgccgcggctcttgttcttcagcttctgctgcctttccttattttgctattccccgcgttgagacgtcggccgtccgctttgggcgctgtatgcgccggggtgctgtttggctccctgctggaagcatgctggatgttcggccccggccttgggctggacccgtccgcatggaaggcatggcttccgcttgtcctgctcttgggagggatggccctgatctgctgtttttccttcctgggggcgctgagcgtccgcagggtatttcccgaatcatgatgaaccgtaccgccgccgttttttttctgttttcccgccgtccaggcgagtatctccccctgttctggctggcaggggctttcgtgctgggtttcctgtggtcgctggcgtacgcttccggtctggtggcggaggagcctttgccgtggccggccggccgcctcatgttcgcattctacggcatgctggtatacggctgggccctccccgtcctgttttcctttgcggcgggaagcaggagccggtggatgaaacccgcagaatggctctggcatgcctgcgttgcgctggggttggcgactattgccgcagggaatgggtgcggcgtgctcctgatgccttttgactggtgggtttgcccggtttttgccttccttgccgcaggggcggcgtgcgtcgcatggttccgcccgtttccgtggcctgtacggctgttgttcagttcctccgccgggtgtgtggccgcggccctttgggcgttgggatatacgcaggcattgtccatgaatggcctgctggatgtttccgccctgggaggaagcctgtcctgcgggctgatgtttgccgccctgggagcggcggcgctccgcctggatatggcgcaggggagggctgccggaattctgtccgtctggatggccctggtgctggcggcggctccggtgattggcgggctgggggggcttcaggggtttcccgtgccgtggatgttggtggaggccggtaccgtctggttttggtgcgccgttcttcccgccgtcctggcggtggcgcgtttttggataaaatccggtacgaagactggaatatgggtgaagaccggagtttccctgcttgccttgctggcggcatggaacgtgtttgttgtgggtgcgcctgagctgatgcagttttccctgtctgcgtggcatgaaccggaattatggattctgctgggggccggagttttgatgatggcaggggggaaggcccccggacgtttccctgtggcatggaggttgttgggcgcaggcgtctgcggcgtgcttctggcgtatgccgtgggcgtgcttgctgccctggatgtccaggcttttcctgaggcccgtcgcgcggagctgatgagcggctgggtgggcatggctgcctgcgtccacgccgttgccatggctttttgcctggcgggaagcctctgcctgtggcggccagcgggagtggaagatggaggccgggagccttcccctccgtttttgcggcgtttcttcttcatttcagccgtagcggcggctttggcgctggcgacggctgcggccgtttttttgcatgctccgcctccggattccatggaggtcaggagacccgttcatgatgcggaaggttccggtatttatgccgcggaggggtgtgccctgtgccatacccagattatccggcgttccctgtccggaaaggactggcagacggcgattgaccgcgggacggatcctgatttcccctaccgggtcagtgaaccggaagacatggatgccgaattcaacagggaaggagcgccgcaggcgggcgtggcagccataggcccggacctgagcaatgcggcggaatacgccgccgggaggctggaatatgaagacgccgtatccggcggcacgcgccgcgccgcgcaggcgcgggaatggctggccctgcatctttacaacccgcgggaaatgcagttcaacaagccctggactgtatgtccgtccatgcccggactgtttgaggaacgcacggtggaagggaacgccccctccacggctgccctgcctgtccggatggaacggggccgggagctggtgccttccccgcgcggggagcgcctgttgaactacctggagtccctgcggagggaggaaccctccctgaagcgcgaccaaatccattcctttccggccctgtcccacattcacccggattatgccgcgcatcctcccgccgtggacatggaacgcctgaagaaggcccgcgccgccgccgtgatggaaaagggcaggggcgtgtacctttccaaatgcgccatctgccacggcaacgacggcatgggggacaaggtgacctatccgcccctggccggatccgaatggctgaaggaaaagcctgatgcggaaatcgtcaagatcatcctccagggactgaccggacccatcacggtgaatggaaaggaatgggattccaccatgctgccgcccggcgtcacggactcccgcgacctggcgaacctgctcacattcctgcgccgccagttcggcggggtggagaaggcggcctatacgccggagcaggtggacgccatccgccgggagctgtgacgggagggcccccgattacaacgtttcatgctcctgaacggaaatggctgcaaatgccattctatgaatttagatgatacgtccgccctttctgcggacagaaacgttgtaatcggaacaaatgccagtgccgccaatggcacggacaatgttgtgataggttacctcttccaccagagacgaccggggtaccgttgtgggttccacgttcgtgggcaccaactccgctggaaccgccctgggggatcatattaaagtagggaattcctgcgtttccgtaggtttctagtccaatacggaccactgtcacatggggattgccctgggttatcagagtaatacgtccaatgaatcggagaagctccatacggccacggcctattccttctgcgcgggcatgggttcccggatcgagggggaccttctgcataggcatcggcagggggggtatgtggaagacggctgcgggcacagcatcgtgcttggcggctattccaggtcggaagtgctcagcgacattgtgatttccggcggccacgcgacggccacccggtgtggttcgtcagtccgggcgtcaccagcggggagatgatgctggccagacaagcccttttagatttccacaacttcctctttcgtgatggtattgtaggccagtgttatccctccgaagccggaaccgggggccggaggattgcccgggtcaatgtcctttgccagcaaatccagcgggtataattccagtttggtgccgggggtgcagaaaaataccacgtcgggattgtccccggtctcgtccgttttaaaaccaagcttgtcccggtaaaattgcagggactttttcatgtctatgactccaaggcagatgccggttactctgttcatgttcttcttcatggaattggcgaatagcctgtttttctgtttaatgttttgcgcagcctccgccaggaaaatgtgtttttcccggttttgttaacgtctggttttatggtgaaagaaacggagccgtccgcaggtagttaaggaaccctttcatgaatcttccttcctcccgcattccctggctggacaacatccgtgtttttgcctgtattctcgttattgccagccacatcgtggggcagttttttgtgtcgcctcctttcactccggacaatgaaacctttgcctggtcctccttttatacggtgctggtgcgggtctccatccccctgtttttcatgatttccggcgccctcctgctgcccgttcgggatacgacggggcaattcctgaaaaaacgcttcacccgcgtcctgttccccttcctgctgtggtctgcgttttacactgtttttccgtggagctatgaaacgctcacgggggacagttttcactccgtcttccccctctcacgggtcacgccggacctggaaaccatgggaacgaacctgctgctgattccactgaaattcagcgtgggcattcatctctggtacctctacgtgctgatgggcctttacctcttcctgccagtcatatccccctgggtggagaaagcgggaaaggcggcctttgcctacttcctgctactgtgggcgctcaccctcttgttcccttatctccagaccattttccccagctatctgggaaaatgcccctggaatgaatacggggccctgcattccttctccgggtacctgggctacatggtgctcggctgctttctgaggaaataccctgggaatgcctccttcgcccgcacggcctgctgggccgttccgtgtctggccgcggccttttggtttaccctccatttctaccggacgtccacggctcaggcctggtcctcaagcggcgactacatcggcttcgccagcattaatgtggccctcatgtctgtggcattattcgttctcttccagtcatttaccgcattcagagccgggtccgcgccgcggcggttcctggctgatttctccagcatgagtttcggcatctacctggtccactttgtgctggtgggagccgtttaccgcctctttggcatgctccatctgttgttccttccggcttctctttccattccgctgctgactgcggcgacgtgcctggcagcctggggaatcatcaagctgctctccttcctccccggcagcaggtacctgatcggataaattccggcatggagacaaaaaactgccctccgcaccgtgtggcgggagggcagtccggatggaaaaagcgggaaaaacagggatcagctcagggtttccaccagtttgtcgccgtaagcggagcaggtaagttccgtggaaccgggaatcatttccgcaaggtcgaacgtaaccgttttttcggaaatcacccggtcaatggcctgaatcagcagatcggcggcttccgtccagcccatgtagcgcaacatcatctccgcagacaggatgacggagctggggttggccttgttcagtccggccagtttcggcccggtgccgtgcgtagcttcaaaaatggaatgccccgtcaggtagttgatgttgcctccgggggcgattccgatgccgccgacctgcgccgccagggcgtcggagatgtaatccccgttcagattcagcgtggctaccacgtcgaagttttccggatggagcagaatttcctgaaggaaggcgtctgcaatgcagtccttgataacgataccgttgggaagtttcagccaagggccgtcccctatggggagggcgccgtattcccgccgtgcgacatcgtatccccagtcacggaagccgccttccgtgaatttcatgatgttgcccttatgcaccagcgtgacgcttttccttccgtttttcacggcatagtcaatggcggcgcgcaccaggcgctccgtgccttcacgggaaacgggcttgatgccgaagccggagctttccgggaaacgcacctttttcatgcggtccgggaaaatgcggctcatggtatcaaaaaacagcttggcatcctccgtgccttccttgaattcgattccggcgtagatgtcttccgtgttttcgcggaaaacgaccatgtccactttttccggagctttgacgggagtttcaatgccgttgaaatagcgcacgggacgcaggcagacaaacagatccagatcctgccgcagcgtgacgttcaggctgcggatgcctccgcccaccggagtggtgagggggcctttgatgccgatgaggtacgtgcgaaaagcttccaccgtttcattcggaagccaggtgcccagattgtcaaaagatttctgcccggcaaaaacttcataccatgcgatggaacgcctgccctgataagccttggctacggctgcgtcaatgacacgggaggccgccgcccatatctcaggaccggttccatcaccgatgatgaaaggaatgacgggcctgtccggaacgcaaagcctgtcgttctgcatggtgacggctgcaccgtccgcgggaggggtgaatgttaaattggccatgacgtgcgttcctttataggacgcagcccggtttggcaagataaaagagcggaatggggaactgcgcttcgtggagcaaccggccttgaaaatgttttcctcatcccgcatgcgcgtgtctcagaaccagcggtccttcccggaaggttcttccggccgactggcttcttcccggaggcgtttgaggaaattttcttcagcctgatgtttcaagccgctctccatgatatgcttccgggcgttttcgttcagctggttgacggcaatggcggcatcttcggaagtcagcctgttccagatgccggcgtcatccttcacgattcgcagggacccctccaccatctcacaggaaatcagattgccatgaaggccttctgccgtaatggggcctttgtttcctgcgggaatgataatccgaagaggttcgggcccttccagattgatgcccccgtgggcgcggtaggccgctttcagaatcagcgttttcctgctccaccaccaggtggtggagtaacggtattcatattcaaaagtccgttccactgttaccaggttggccactttttcatccttctgcacaatcagggccacgccgccgtggttggaggaaaaacccttattgatcagggtgaggcccgcttccctgccggcttcaatcagtttttccgctacagccatcggcttttccgccggggcggtgatgcaggtgcgcacaccccagaacaatacggccagcacacctatcagaacggcacccctggccagcgcgacaatggcgggggaatggaaaaaggtgggggaggatccgcgcatgagatgttgtgcgtggcggaagttcagggttccgggtcttcatgagaaccatgttccctgatggggggcatgaacagggccaggaaggtgaaggcaatgacggtcaggtcatctatctgtcctactcccggaatgaaatccggaatcaggtcaatgggggaaaaggcataaagagccgtcagagccaggaggacaagcttgcgtctggtgaacaggcgcggttctccttcccggctgcggaagtaattgatggccctgaccagaagctgctgcctggagccgttgggcggaatgggaatcttgtttttcatggagatgcaggggtgaatttaccgtcaatggaaaagaaactcttttttatatggaccggaagcagacccggaggcgggataacggccccccttcgtcctaccttgtcccggcaacggcacgggaagggatttttttgaagccgttttctgtaggcgtcttttcatcaggaaagctctttccttattgtctcatgcactcccggccgcgtccagagcaattcccggcttcttccgggaatgagcttccttgcatttgagagagagtataacgtttacttttgtccctgccgttttccgagcctgttttcccccagccgcaaaaacgttccgcagggtagaggagggcttcttccccattggcctgcgttcccttcccggcagaggtccgcttgggcttgcggcattgacacggcgggaggcacggggtactctcctgcggcatataatgatcagttttaccaatatcagcggggccgaggaaattggggccaattgctatttgcttgagatggacggcaccaggattgtgcttgacagcgggatgcaccccaagaaggaggggaaggcggccatgccggattttgattccctggaacccaattccgtggaagccgtttttttaagccattcccacctggaccatctgggaacgctgcctgtgcttcaggagaaacagccagcggcggaggtgttcatgacgcccgccgcggcagccctgtctgaagtgatgctgcataattccgtgaatgtgatgagcgccaagaggctggacctgggcattgtggagtatccttttttcacccataatgatctggacagattgagcgacgcctggcatgccaagtcctgcaatgaagtgtttcgcgtgggcttccgccagaacgtgctggccacgttttacgatgccgggcacatcctggggtctgccggcgtgatgctggagggtgagagcggccataccgtattttatacgggggacgtgcagtttgaagaccagagcatgattcccggggctgattttccggaatccggcgtagatacgctggttatggagtgcacgcgcggcggtttccagcgcagcgcccactattcccggccggaagagatggtgaggttcgggaaagcgattgcggagacgctggaacgcggcggcgccgtactgattccggtattcgccatcggcaagagccaggagatgctgttcaacattcaccgtttcaagcagcagggggtgattcccgccaatactcccgtgtacttcggcgggttgagcgcgaaagtttccctgttgtacgaccgttttgccgggttgacgcgcaggcatgaccatgaattcaagctgaaggaggagattcagaccgtgccccttccgcgcaagggaaaagctccgctggtgtgttccccggggaatatttatgtggtgtccagcggcatgatgacggaaaatacgctttccaacgtcatggcggagcaggttcttccccaggagaagaatgctattttgttcgtaggatatgcggatcccgattctccggcgggactgctgaaggcaactcctgaaggcgaactggtgaaaatgaggcccaacgggcagccggtgcgccgcaagtgcaccgtggactgttttgatttttccgggcatgccacccgggactccctggttaattatgccgtgaagctgaaccccaggcaggtggttctggtgcacggggacccggatgccgtggagtggatgcaccacacgctatccgccaaaatgcctgattccaccatcgtcgttcctgagccgggacgccgctacactttcgagccatgagttttaccggagaaagaaaggggaggctgatcgtctttgaaggcattgacggcacgggcaagtccacccacatcggccacttgcgaaagtatttggaggagaaggggctggaagtggtgcagagttttgagcccacacgcggacggtggggccggatgctccgggactccgccgtgaccggacgcctttccgtagaggaggaagtagccctgttcctgaaagacaggagggaacatgtgaagatgctgattgctcccgcattggcgcggggggcatgggttctgctggatcgctactatctttccatgatggcttaccagggcgcgcgcggcatagatccggaggttatccgtgccgccaatgaagaatttgccccggtgccggatgccgtggtctggctggacattcccgtttccgtggcgctggaacgcattgggaaccgcggggaacgcgacgcttttgagacggaagcgggcctggcggcctgccgcagcgtgtttgcatccgtccatgctccctggatgctccgcatagacgcggacgccgggaaggaagaggtggcggcaagagtgcggaaggctctttccatgcgtttccccgatgtcattggggcataggcatctcctttcggccataggccggggatttttccttagcgtttcattcctggcatttggatgctattccgcaggcgcataagccgttggatccggaattccggcttccctgaaggcttcccggcgttccatgcaggtggaacagacgccgcagtggacggctccgcccttgtagcaggaataggtgcgggaaaagtccacgcccaaatcctggcccatggcggcgatgccgcccttggacatgtggatgaaagggcgcaggatgcccaggccggcataggttcccaggcgaatggcttccgtcatggcggccatgaattcctcccggcagtccggatagatgctatggtccccggaatgggccgcaatgacgagctgctgcgccccgcagctttccgcaaccccggcggcgatggacaggaagatgccgttgcggaaggggacgacggtctgcttcatcagttcttcatcataggaaccgtccggaatatcgtccgcgccggagaggagggctgatttcaaatgggaggagatggaggaaatgtcaatcacgcggtgttctatgcccagactggcggcctgccaggcagcgcatttcagctctcgttccgcgtggttggaggcatagtcaaagctgagggccacccggacgcggtggttccggtgggcccagtgcagggctacgctggagtccaatcccccgctgagcagtacggctgtttccattttgtccatggtctggattacagggggcggttttccggattgtgttcggctgttgcggtcagctggatgccgccgcggggggagaagcggccttccaccttcagccaccgcggggaaatggcggccaccagatcatccgtgatgcggttgacgatttgttcattaaaagccggatagttgcggtaggaggccaggtagtatttgagagatttggtttccacgcacttttccgccggaacgtaggtgatcgtcaggtgacaggaatccggttgaccggtaacggggcagagggaggaaaattcatgggtgtccagcgtgatggtgtagggacgcgtgccgcggttagggaaggattccagcctggcgtcgtcgggattggtaaagaaggagctttgagagcctaatagagtcagatggtcgtcggacatggttgttgtatatggtaatggatgttcaggtcccctggacgggggctccgccggggaattctttcacgtacaggtcctgttgagggaatgggatggaaatgccgtgttcgttgaacgcattatagatgtgttcccgcacggaggaaaggctggaggactttgtcatgacgggaacccagacccatacgcccagattgacggcactgtctccgaaactgtccagcaccacgctggttttcttgactttggaaaggaagggcagggttgccagcgtttccagaatgattttgcgcgccctttccacgtccgtcccgtaggaaatgcccacttccaccttcacgcattcgaatttgtggttgcgggtcatgttgcggaagttcttgttgaaaagctgggagttctggaaggcgatgatagagccgtccagcgtctcgatcatggtggagcggtagcccagggaggagacgcggccccggtagccgtcgcattcaatcatgtcgccctggcgcaggcgacccagcattagggagaggccgctgatgatgttttcaatggtatctttcagggcgaagccgatgcccatgctcaagcctcccatgaccatcagcagcccgttgtagttggcgttcatgatgataagcgccgtaaaaacgaagagcccccagagaaaaagggtggagagtgtcacgaaggtggggatggtgcctacttcataatcttctccatagatttcatgcagcgtatttttccccaggaatatcaagtagttgagaacaatggccatcaggatgaccgtgatgacgctgctccagctgaaagtgagcagatccttgatttccgtggttgcgaaaattttattaatgatgaggtcccccatgtcgaaggtggcggcgggccagatgatgctgaacaggatgaggaaaatggtcaggcagggaagcagcagcttggagatgaaggggcggaaccacaggatggccctcttgttccgttccttccggcggttttcataatggtggagcagatcccacagccccaccagcagcaggatgctggtcatcagcatgatccaggtcatcagcaccaggaaggccatgaagctgaatccagtccagcacaggacgctgcccaggatggtgaataccagagatacggtggagaaaaaacggtccagccggggcagcttgtgcctctgccgcacccaggtcagcagggagaagagggaaaccagcgtgaacaggatgggcatggaaatgtccacgatgatgttgggggccatgaacatgcgcagaagcatgaagaatccgcccagaagcagatagggcatgtagatgcggatgccggagttaatggtgccatacggaaggcgcgtgaccagggagaacaggatggcgctgaccagaagaaggaattccgcgcccagggaagccgcgctctccagcaggtagtccggcgtgcgcagtgaagcaatgacgaggatcagcgccacgataagaatggtggtgacgttggtgaaagcatggcgtttgttgtagttgcccgtctttttcagcgtttttttgaagcccaggaggacgatgaagcgggcaaggcagtaggagcacaggatgacgcccagcaggataaggccgtagtgtttgagcgtttccgtgtctgatggaagctggagcttgctgtccgcggatgtttcccatacgctcatgcatatttcatacgttttgagcggcttgagaaagatatacctggccgcatgggagggggtgtagaatatcctgttgaacagggaggtgaacatttgggcgctttcatagttcagcgcgtctatcttcctgtccagattattgaaaagttccttaaggtaaataaactgctccttttctccctgaagggatttttccagctcctggcaggcatacagagcttcgtccctctgcaccagggatggttccgacaggttggccgtgtttacttcctccagggattccgccagtttttctatgcgttctatttccttgctcagccgttcctcctgttcctggaagtccggtttttgggcgtaatacatttccaccagcctggtggcggccttgcagtaaaaagccagcgtaaagattttttgatcgtccaaggcgtaaagcacggcggacatttcatataccctagtgtcaaaataattgtaggtggcgtccgcattctttaccagcacttcccggacggccatccttttttcctcattctttttcaggatggtgatttcatggcacagggccatgataaccgcatccatttccgattggttcggctgcgtctgaggctgttcctgcttggcttcctccgcctgttccggggcggcggaaggcggttccgcctgctgtgcggacgcagaacctgcggccagaacccccgccagaaaaaaggcggcgcagcggcggaaaaagatccggtaatcagggatgctcatgaatggtccctgttctaggggctgcgggcattacggtcaaggttatatatttttcctgctgacggagggggagattctcaggaaaagcccgttttcttcaaagcaggacgtaggaaagggcagggcattttccgtgaattcggaaaatgccctttcgtaaacaggaaacgctccggaaatcttccggagcgtttgaagagaaagctgattccggcgggaatcagtccagggaaaaggaacggattctccttacggtttcctcccggcccagcagggaaaagacggaggaaagatccgggccgccgcttaacccggtgagggccacccgggcagggaacatcacggcccccatttttacgccgttttccttggcaaaggctttcagcacgccaatgagttcatgaccatcccattccggttcctgttccagcctgtccgccagtttgaaaagcagttccagggcttccggctgaaccttggagacggcttccgaatccatgcacagttcaaaaaagaaacggattttatccgggacttccgccagggtctgcaccttcgtttgcacggtggcgatggcggcgtccagaatcggggaatcaggcaggccggctttcaaacagaaagggcgtgcccggagggcgaattcttccgcaggcagggcgatgatgtgctgctggttgacccagcggcatttggtgatatcgaatttggcggcggagtggttaacggcttccagagagaagcgttcgatcagctcctgaggggagaaaatttccgtatcgtccttgggggaccagcccagcagggccagaaagttcatgacgccttccggcagaaagccttcttccgggtaggttcccagggcggcgcccacgtcacgcttggacattttggagccgtcctgattcaaaatcagcggcatgtgggcgaaaacagggggagtgacgccgaaggcctcaaacagctggatgtgcttgggcgtgttcatgatgtggtcttccccgcgaatgacgtgggtcatcttcatctcaatatcgtctaccacgttgacaaagtggaagatgtaggaaccgtccgcgcggcggatagccatgtccggggtgttggaggcgtcccggtagtcaatggtgatgtctccgcaaatcaggtcatggaaggtgacgggtttggagcggtcaaagcggaaacgccaggctccttcatcctcgtacacgcggccggcgtcctggagcttcttgaaataggcgtcgtaaatatcgttgcgctggctttgaaaataggggccgcaatcgccgcctttcatgggcccctcatcccagtccagccccagccattccatgccggtgaagattgcgcgggtagcctcctccgtattgcgggcgttgtccgtgtcttcaatgcggaggatgaaggtcccccccatcttgcgggcgaacagccagttgaacagggcggtgcgggcgcccccgatgtgaaggtagcctgtgggggaaggagcgaatcttgttctgacgtgactcatgatgggtaagagagtaagggcctctcttcccgcgtcaagcagatacagggggtgcatgccaaaaaacggggatgcggaggcagtggattttttaggacgttgtcggccttgcggcttgcgtggaggaggcttttaggcttcatttaacgccgtgttctttttaaaacacatattccgtctgcgggagaagtggcagattaaaagggaagatgaggaaaagccctttctggagcatctggacgacctgcggaccatgctgctgaggatggccctgtgcctgaccgtcagcacaattctgtgcgccgggtttgcgtccaatctgatggacatcctgaggcgtcccgtcaaccaggtgtgggatatgtttgaagaatcccatcttccggcaggtattggtctggatgcctggggcaaggccaaggaaatggcaacggccatgacgagcctgggagcttcccagcgggcattgtttctccgccaggtttccccatcccaggcagatttgacggaggctgccctggtgcttcgcggcgcgcagccgctgccggaggacaggaagcagattttcatcagggaaggcagcccctccacggccgtgagggatctggcggaatccctgtattccaaaggagccgtgctggcagacggaacggggcggggggccctcaagatgatgagcgcgttccagcccggggaggcgtttatgctgaccatcaagctttccctgtatgctggagtggtcatttccttcccgcttctgttgtacttcctgctgcaattcatcattccggggctgctggaacatgaacgcaagctgctgtacaagtgcatggctgtcggttttggtctcttcctggccggaacgctgttctgttacttcatcgtcctcccgcgggtattgacgtttttttacacctattccctggaattcggcatctccaatgaatggcgcatcggctactacctgtccttcgccacgcagatgattttaatgttcggactggcttttgaattgcctgtggtagtgatgcccttcgtcaaactgggggtgttgacctatgacatgatgaagtccacgagacgctatgccattgtggctatcgccgtcctggctgcggtcatcacccctacgccggatgtagctaccatgatgctgatggccgttcccatgtatgcgctgtatgaaatatgcatcattctggcctggatgcatgaacgcaaggaagccgcgcgcgcccgggaggaaatagcccggtttgaagaagatttcaacaacaacaattctccctacaaccagtaaatacatccaacccacgccaatatcatgaaccttctggaaattattatcctgggcattgtagagggcctgaccgaatatttgccggtcagctccacgggccacctgctcctgacggaatccctgctgaacatgtcccagagcaaggaagctctggatgccctggccgtctgcatccaggggggagccatcctggcggttctgagcctgtattttccgagggtaaaggccatggcgcagggcgtgcgcggcaataaccccgccgggctgaaactgctggtcaacctcattctggccttccttcccgccgccgtggtgggcctgtgctgcgcttcactgattaaggaatatctgttcaacacatatacggtggcttattcatggatcgtagggggaggcgttattctggcgtattgcgcctggcgcaccagggaggggcgttccaatgaaggggactccggcgcctccattgaaagcctgacgccgggcaaagcgctgacggtgggtgcgctccagtgcgtggccatgatccccggcaccagccggagcctgatgaccatgctgggaggcatgttcgtggggttgagcgtggaagcggccgtggagttcagctttttgctgggattgattaccctgggcgcggccacggtccatgatgcgtataaggacggagctctgatgctggaatccttcgggtgggaagcccttgccgtggggacggcggtcagctggctttccgcatggctggctgtaaaatggatggtatcctatctgcaaaggcacagtttttccgtattcggatggtaccgcatcgccattggtatcgtgacgctggttctcctgtccatggggctggtgcattgaaaaacggattccggcattcaagcaccggaaaacgtttttttccggcaaggcggttctctcccgcagcgggaagcgggttttgaacaatcccggagaaggttggccgctgcctggacaaagccatgacacagggccgttttgcatccccggaacaaaacagccctgcgatgaatagcgtttcaggaaaacttatctcctgtgcgttccgtgggaattcccgggattggagggtttcggtgaaggagatgaatgaggggaggacggcctgctgggtgcgctggcggaatggggcggggaagaaggccgggaaacgggagagggcctgccgggacggttgatgccggagtggcctggattgggggaggaaggccttgaagacggcagggtggaagggcggctgggacgtccgaaatccggtctggagggacgattgccttccgggcggttgatgacggggcgattcgtgccgccgggacgggaaagattattggcggaggggcgagaaggccgtccgggctggttgattcccggatgatgtactggcggtcgctgtaaattgccgggttttccaaagtccggccgttgattgggccgtccgggctgaggggccggcctgttgtttcccggacggaaatggtcaggcctgaagtggggtttcatcggcggttttgccatggggcggcagttatggggacggacataatgcccgcggtaataaggagccggcccccacgtgggaatatagtaattcggacggatcaggttgatggagtaaatggggcttccgaacgtgtcgtaggcataaatgggtcttcctccataatatccgtaaatggggtagccggagctgtcatacatgtacgacacgccggaacctccgctgctgtaggagcctgacacgctgaaatggtcataataaggatcgtagcagctggacaaagcacagccgatagcggccgccagcagtgagttttttaagataacgtatgctttcatgatgacgaaacggggtgaattatattttcccttcgcctgaaaagcggcaaggaaaaagtacatttgtttaaaattattttgcttggaaacgcacttactgttgtcttagactgcaaaaacgttctacgtgatgggaattctttttcaaaataaaaaagtcggtctggctctgctgtgcgataacgccccttatacgctggccatgactctggcttcctatggcaggtccgggctgcttggctattttgacgaagcatgcgccgtttttccggaaagcgccgtcaaggtgcgggagacggccctttcccatgggctttccgcggtggccgccccagtggaaggcggttttattggagccctgcatacggcggtcaacgctcttgatacggattacgtgctgctggcggaggatgactgcatgatctgggaacacctgcgcggggaaaacctggaaaagcagttgaaacgggcattggacctgctgatttccggacaggcggatatggtgcgcctgcgccatgcatggcgcggttgcacgcgctataaggccgcttatacatattcctacttttatcccgtggaacagctagccaccatgtgggtgcatgcggaaggtttgtcggaagcgccggactggattaaaagcatccggcgcttctttcaccctctccgctccaagcgttcgataggccgttgcgtttatgtggagcagaacccgcatcttcgctttccccagtacattaccaagattgatgaaggctatattattgacagcgaggttttccagtggaccaatcagcctacgctcatcgcacgttccagaatcaggcagattctgacggggctggagcagatgtccggctccatcgggaaattgccgcaggattttgaacatgccgtcaatagcccgcgatggaggaacgcccatatgaacataggcgtcatcaggggaattttcacttaaatgcgtatggaaaacggcggaaaagcggtgcggtatgaatgcaccagatgcggcgcgtgctgccgctgggccggggatgtgtgcattgagacggatgaaatccacgagatttcccgtttcctgaacatggacgaacaggtttttattgacacatgctgccggttgagagccaaccggcgcggattgtctatccgggacgcggaagacggagcctgcatgatgctgacgaaagacggctgccggattaatcccgttaaaccccgccagtgccgggattttcccaacaaatggaattttcccggctggcgggatttgtgccgcgccagagaagtgggggaggaacgggaagcataatatttgccgggatgccgcaagattcttttcttcttccggcattattccatggacggggtgaaatccggccggaatcttgtgttttttacaggaactgagccagatcccgttcaaaaccgggataggacgtattgatgcattccgcatccgtcactacggtttctccctgtgcgctgagtccggccaccaggaagctcatggcgatgcggtggtccccataactggataattccgttcccttcaggggggtgccgccgtgaacaaccatgccatcatcaaattcttccacatccacgcccatgagccggaggttggcagccgtggtggcaatgcggtccgtttccttgacgcgcaattcgcgggcgtttcggacgatgaagtctccccggcccagggctcccgctacggccaggatgggtatctcgtcaatgaggttgggtatttcttccgggaggaggctggtgccgtgcagggaatccgaaccgtacacggtaatatcgccgtatggttcgccggcatcttccggagaagtgggcacgatgtccattcgcgcgcccatcctttgcagagcgctgatgacggcgttccgcgtcttgttcagccccacctggcgcaacgtcaggcgggaccccggccggctggcggcggctaccatccagaaggctgcggaggaaatatctgccgggactgtcaaattatgggcgacggggagagccggcccgcaggttccgacggtaagtccatccacggtgcagggaacgccgaaatggcggaacaggcgttctgtatggtcgcgggtggcggccggctggcgcacggtagtggttccgtccgcaaacatgcccgccaatagaatggcgcttttaacctgggcgctggccatgggaagcgcgtaggaaatagggtgcacccgcccgccgtgaatgctcagcggagcacagcccggtttggttccccgggcttcaatccgcgctcccatttgttccagcggctgcatgatgcggcccatggggcgggagctcagggaagcgtctccaaacatttccgaatcaaaggggcaggcggccagcatcccggccagcagcctcatgcccgtaccggaattgccgcagtcgatgggccgttcaggagccttggggctcatggcgacgcccgtaattcggaagcggacgggaccgtatccctgccgttcttccagcacatccactttggcgcccagctgctccatggcgcgcagggtattcaagcaatcttcactgcatagaaaattatccacttccgtcactccttgcgccaggcctcccagaatggcggcgcggtgggaaatgcttttgtctccgggtacggtcagtaccccttgcagggaggaaatggaatgggaatgaaggttcatgagtttccggaagaactaccctgtatcggctgccgaatcaagccaattacgagacgggcggaggcatcaggggacattccagaatggagttgattttccgggacggtagcgtatattcatgtgcgttatcggctgcatccccctgaaaagaaggagagagcttttcaggatcaatggatcaagctggttttcataggtagtaagttggagcggccacgggagcagtcctgtggccgctttgccttattcagggaagagggcgcccattggcttgaagaaggaagcggaaggaagaaagaaacaaaattctttccatgtctgctttgggctttaccgcgagccgatgaaagcgtatgtagtccatgccgatcaggttcgggtggtcgctgttccggtctccggaccggagtagaggaaagtccggacatcacaaggcagcgtgtcccgtgaaagcgggagacgggaatctcccaagggttcccggacggaaagtgccacagaaaacaaaccgcccggatggggttctcctcatgccgggcaagggtgaaaaggggaggtaagagctcaccgctccgagggtgaccaaggaggcatggtaaaccccgcgcgatgcaagacaaacaggggaagggtcgcctgcccgccggatccccgggtattagtcgcatccgtttcgtgaaagcgaacgggcgcgcggaacgtctgaccgcggtccgcgtgagaaaaatgaccgcacagccggctctgtccggcggacaaaatctggcttacagaacctggtcggctcctgcttttttaccatgccgttttccttccctcttttcgggggaagagaaacatccgggaatttgtcccgttccgggggctctttggggttgcatgggcgttttaaatgtgtagaatccgtcacctaattgcaacccactatggagaagcttgtcgtacatggaggttttacgctgaggggagccgtcaatatcagcgggtccaaaaatgcctccctgcctattttggccgcatccctgctgacggatgagcctgtagtggtgcgccgggttccggatgtttccgataccaatttcatggttcagatcatgggccagctgggagcctccgtggaacggtccagcggcaatgtgcgcgtggaagccaggagtctgcattccgaagccgcttatgaacaggtacgcaagatgcgcgcctccatctgcctgatggggcccttgatggcccgcatgcagcggtgcgtgattcccctgccgggcggctgtgtgattggcgaccgtcctgtggatctgcatatcagggccatccaggcattgggggcacaggtgcagattgagcgcggcaacctgattattgaagctcccagggggttgaaaggagccacggtggatttgagcggcgaccacggccccaccgttctgggaacggacaacctgatgatggccgccgtattggcggaaggcaccaccgttattgaatccgcagcctccgaaccggaagtggtggatctggcgaactttttaatcaagatgggcgccaatattcaaggtgcgggaacgcgccggatcgtcattgagggagtggaaaagctccgtggctgcaaccataccgttatcccggaccgcattgaggccggcacctttatggtggcggcggccatgatgggggatggcgtgaccctgcggcgcgtgtgtgaggaacacatgactgtggtgacggatttgctccggaagtgcggccaccacgtggaattcaacgagcggggggatacggtcaccatcattgccgggaaaacgcccaaatgcggagaaatcaagactgccccgtatcccggctaccccacggacatgcaggcccagatgacggctctcttcgccaccacgccgggcatctccgtggtgaaggatactattttcccgcagcgtttcatgcactgctccgaactcaagcgcatgggggcggacatcaaggtggataacggcaccgccgtcatttccggagtggaaacgctcagcggcgcccccgtcatggcctccgacctgcgggcctccgccgccctggtgctggcagccctgaaggcggaaggcactacggaaatccaccgcctgtaccatattgaccgaggctatgaaatgattgacgaaaaactcctggccatcggcgctgcagtagaaaggctgccggatgacgacaattaacgccgttttaggtcctgattttccttcataccgcattttttctttactgtcagggctccatatgctattcaccgaagtcctatgaacaaggctcaactgatcgaactgattcaaagcaagctgggtgctgatacgaccaagaagcacgctgaagaagctctggccgctgtactggaatccatcaaggaaggcgtgaaggaatccggcaaggtgcagatcattggctttggtacttttgctaccaagacccgtgaagcccgtaccggccgcaacccgaagaccggcaacacgatcaatattcccgcctccaagacggttgctttcaaggcatcttccgccttgaaggactaagacggcaactccttctcaagggagtacttttctttcagcacccccgtcctttgaggacaggggtgttttttatgtcccgctgcggatgcccacggcttgaccggatgaacgccgccgtctagaatgccgccatgtccagcagttttggtcaggtgttcagaatttctacctggggtgaatcccatggaactggggtaggcgtggtgattgatggttgcccgtccctcgtcccggtgacggaagaagacattcagcgggagctggaccggcgcaggccgggacaaagcgacatcgtaaccccccgcagggaggaagaccgcgcggaaatcctttccggagtgctggacggcaaaaccctgggaacgcctatcgccatcagtgttcggaacaaggatcaccgctcttccgcctatgacgagatggccagcacgtaccggccttcccatgcggactacacatacgacgctaaatacggtattcgcgcctgggcaggggggggccgggcctccgcacgggaaaccatcggccgcgtcgcagccggagccgtggccagggctgtactgaagcaggcttttcccgacatggaggtcatagcctgggtggatcaggttcaccatgtgaaagcttccgtggactgggaggccgtgacggcttccgttattgaaagcaacatcgtccgtacggcggattcctccgctgcggaagccatgatcgctgccatcaaggaagctcgtgactccggaaactccttgggcggcgtggtcaaatgcgtggtgcgcggctgccctcccgggctgggtgacccggtctttgacaagctggacgctacgctagcccacgccatgatgagcattcccgccaccaaggctttcgccgtgggttccggttttgaagcggcgggcatgaccggtctggaacataatgaccctttttacatgcagggccgccgggtgcgtaccgccaccaaccactccggcggtattcagggaggcatctccaacggggaggacattctgatgcgcatcggcttcaagcctacggccaccttgatgattgaccagcagacggtcaacagggacggggaggatgcccggctcaagggcaggggacggcatgatgcctgcgtactgccgcgcgccgtgcccattgtggaggccatggcctggctctgcctgtgcgaccactacctgcgccaacgctgccagagggctttgtaacaaccggtttcacggcttcttttccctcactcatggattcctccctcacattttacctggttctgggcgcattgctgctgggtttcatcgtgctcggcatgctgaaggggatgattaagatgctcctgttcggtgcggcagtgctctcttccgtagccgcttacttctggctatccaaatacggtttcacctacctctctttcatcaccagcgatcctcgggaatggatggtcactgtgctgtccgtcggaggcgcggcggcggtcttctttgtctttatgcacggtctcttctggttcagcgacgtcttctcctggggacggcgcatgggcttcggcgggaccaagggaatcgtcacgacggtactgatggcggcagtcgtatgctgggtgggagtcatgtgcatcttcttttacggctccatggcggaaatgacccgcgcccgagaactggccctgtaccacatggaccccaaccgcaccatttccctccctgccatttattccatcaaaaagtccatcatggacaacccccacctgagctggctggaaaaaatatctccggagcatgatccggaacggctttccctggcaaaaatgatcgcctacctggtgacgctcagtccggagctctccgaccagcggcgcacccagctggactgctatatgccccgttcccgcattaccagccgcgtgctaagcctgaaaagcctgagcgaagaccccgccatccgtcttctggtgcagaagggggatatgcagggcttatacaatgacgtcaagctgacccgctttctggaagaccacgatgtccgttccgtcctgtcccaactggatgttgatcgtgtgctgggctttgtcacggaaattcgccggacggccccagccggaaatgaatacattcccgaagccacgccaattgagtgataaacgcggattttttgttccgccgtagtggattcgttccttttatccgcctttaattcaagaaaaaatcagggaattatccccccttgcgcccgaaccggaaaaagagagttcctgcttttttaggaaaaagtgcttcctccaggcgttcgtcccggaagaagtgctcttttgaagataagatgactgaaatcttgaaaaaacatcaggagagtttttccgcgatggcatccacccattccgggaaggtgtcatcatggtctccattggaaagcactaccggcagaagcctttgcgctttcaaacgttccaggaaggaatcgaagtccttgccagcctggcagaagttttcataaaattcatctccaagggcaaaaacggcgtagcttacctcggacaaatcttccgaagagtccttcaattcctgatggagggtctctgcgttggtgggaggttctccgtccccccacgtactggtgatgaccagcagcgttcccgcattcttcaactgttccaccgtcataccttccatgtcaaccacctttgcctgatggccgagcttggtcaattttgcccgcgcgtcctgggccagactctccgaattgccggtttccgttccgtagataatagtgatttccatgcgttctgattattggttcgacaacgaaagttagattgaactaattaaacaggcaagacaaaacagcggaacgacggttgaatttttcttccttgttcatccttccgggtaactggttttccggaaaattctccgatgccatactactctcgtttgattatcaaagtattcggatgctgtggaaaggtgaagcaccagccgaaaagacgcgcaaaacggtagtataatcccttgcggcaggaattttggctggtcatgatatcgtaaaaagccaggtcaatctggcttctggaaataggggctccattcattttggcgtgcagcatggcgtcgtggaacagggaagggaggagcatatccggaggggtggacccccaggtgacgccgtcccagccatagccgggagtaatgctgaaacgaccgccctccgcctgcatgcgtatggatgggtcatacacgctgacggctgtccagcggccaaaatccgccttttttcttccgctggtccagctgatggcgtttttagtgatgtagaaaggcttgtcttcatagagggttccttcataccagcctgccacgggttccggagccgcggctggcgtggagcaggatttcagaaacatggctgcacatattgttgtgaacaatatgtaaatacaatgtgaataagaaataaagggcatgaggggacggagcgttatccggatagttgtttcttattggatttccagcacgatgatttccggagggcagcagaagcgcaggggaagaacgctgcatcccaaacctcgggtaatgaggaagggagttccgttcagctgggaccagggataggaaaatttgaccttctctcgtgagatgtttgccagggccctgcctccgggaaggcatatctggcctccgtgggtatgcgcgctgatgacgaggtccgccgtgccgggagccagcagaggaaaaatgtcgggtacatgtgaaagaaggatatgcggaatatccggggaaaaacgcagaggcaattcctccggcctgattctcaggtggtagtcgtccctgacggaagagagctgcagctcacggcctccgggaaggtgcagcagcagggaatcattccacatgggcaggatgcccagcccggaaaacatgttgcgccataagttccagccgtaatactggtcatggttgccctgcacggcaaaaatgccgagaggggctttcaacatcttgaaatattcccgggccgtctccggggccatgctgctctccctcgtgtggccgttggcataatcccccagcaggaaaatcatatccggccgagcttccatgattgtttccatgtacttgtgtgccagatcgcctccgttcggacgcagatggaaatccccggcaatcgcgatgcggaggggagggccttcttttctcttccactgaggcatctccatcgcagccgtgacggtttccacacgcctgggttccacctgccatgcccacatgaataaggagaagccaatcatcaatattgggacaaagatgattgccaatttgttgagaaagggtcggcgtggtcgtgacttcatgcagggcagggctcctgactgattatgaggccttttaaccgattttcaatcattcgtgtttgctaatcgggaatttgctggtatgatccgtcccgctcaaggtagggctgtccgatgactgcagctctatcttcatattaacatcctaataccatgcagtttacacacgaaatcgaacaaatgtgttgcgtcaagaaaggctgcaaccatggtccggcccctatcccgcaggaaggcaactggacgcaatccagggaaatcacggatatttccggcctgacccacggcgtgggctggtgcgctccccagcagggcacctgcaaactgacgctgaatgtcaaaaacggcatcattgaagaagcactcgtggaaaccagcggctgctccggcatgacccattccgcagccatggctgcggaaatcctgcccggcaagaccgtattggaagcaatgaacacggacctcgtgtgcgacgccatcaacaccgccatgcgcgaactgttcctgcagatcgtgtacggccgcacccagagcgctttttctgaaggaggccttcccatcggcgccggtcttgaagacctcggcaaggggcttcgctcccagattggcaccctgtacggcacccgagccaagggcccccgctatttggaaatggctgaaggctacattaccaagcttgccctggatgaagacggtgaaatcatcggctacgagtttgtgcgcatggggccgatgatggaaatgatcaagaagggcgtggacgccaacgaagccgtcgccaaatgcacgggcaactacggtcgtttcgacgaggcagccaagtacattgatcctcgtcacgaatgagattgaattaaaaagagtatcttaacttcaagcactattactattatgcctcttttcgaatcctacgaccgccgcatcaagcagatcaatgaagccctggccaaatacggcatcggctccattgaagaagcggaacaactctgcctttccaagggaatcaacccccgtgaaattgtgaacggcattcagcccatcgcgtttgaaaacgccggctgggcctatgtggtgggagccgccatcgccatcaagaagggctgcacgaaagccgccgacgctgctgaagccatcggagaaggccttcagtccttctgcattcccggctccgttgcggatgaacgcaaggtgggcctgggccacggcaacctggccgccatgctcctgcgcgatgaaacggaatgcttctgcttcctggccgggcacgaatcctttgccgccgctgaaggtgccatcggtattgccaagtccgccaaccgcgtccgcaagcaggatctccgcgtctgcctgaacggcctcggcaaggatgccgcgtacatcatctcccgcatcaacgggtttacatatgtgcaaaccaagttcgactatgccacaggcaagctgaacatcatccaggagaaagctttctccaagggccccaaagccgccgtgcgcgtgtatggctgcgatgatgtgcgcgaaggcgtggctgtcatgtggaatgaaggcgtggacgtttccattaccggaaactccaccaaccccacccgcttccagcacccggtggccggcacctacaagaaggaatgcaatgagaagggcaagaagtacttctccgtggcttccggcggcggcacgggccgtaccctgcacccggacaacatggcggccggtcccgcctcctacggcatgactgacaccatgggccgcatgcactccgatgcccagttcgccggttcttcctccgtgcccgcccatgtggaaatgatgggcctcatcggcatgggcaataacccgatggttggcgcttccgtagcggtggccgtggctgttgaagaagccgccaagcagaacgcctgagcgagcagctgatcaaaaaaaccgcagagccgctttccctaatcgggaaagcggctcttttagcaattgaaagaaaaagggggatgtccccatttccggccccctcttcctgcccttgtatccgcatcagcttccgatacggaatcttccatcccggtccgcccggggaggaagtccgcgcgaaggaacggatcttctggaaacggattcctggctggcagaggacggcttgacggagcggatttccgggcgggaggcagaagcgggaacaaccgtttttcccggttgcgtgccgtgggaggaagggagaacaggaacggttccgacaaccgttttttgccgttcatgggccttataggcgcgttgcagggtaaaatcccgctgttctcccggtctcagggaataatccgcctttttgggagctccggctttttgcgccagaggttccacgcgccgctgcagctgtgcggcggcatccagtttgcctgccacccattccggattccattccggctcggatattttcagggactgaagcaactgcgccgcttttttgccgctttccagggctgccttataatccccctccttctcctgccgtgccgcgcgcgtcagggaaaggttggcttcgtaaaaagtgtctccgggattgccaaaggccgttgtagccgccaggaacatgcagagcagggaacagggtagaaacttccttttcatgattgttggcacgataacatgattcctcgttttggaaagtcctttcttccggcatgttttgcgcagggccggactccgtttcccttgcggatagaggaaaggttctccatcccgcaccccggagcaacttgacggaaagtccggagtgccgtatgctgggcgggacctgctatatgacccggaacgagccatcatcccttccagctccgcagatggaggaagatcccagattcctgacggaacaaattgtaacctatttgggcaataagcgttccctgcttcattttctggggacgggactggaacaggtgaaaaaacgcctgggtaaggaaaggctgaaagcaggggatcttttttccggcagcggcattgtggcgcgttttctgaaacagcattcggaagagttgatcgtcaatgatctggaggaatacagccgggtcgtcaatacctgttacctgagcaacgcggaggaagtggaaaatctggagctggacaggcattacagacgcctgctgcggtatatggaaacgcatgaatccccaggcttcatcacggaactgtacgctcccagaaatccggactgcatcacggcggatgaccgcgttttctatacgcgccgcaacgccgtgtacctggatacggcgcggcagaccatcaatttgcttccggcagaaatcaggccctattttatcgctcctctactggcggaagcttccgtccacacaaacacgtccggcgtattcaaaggcttttacaaagacagaaacggaatcggcaaattcgggggaacggggggcaacgccctttcccgcattctgggcgacatttcgctgccgtttcccgtgttttcccggtttgactgccggtattccatccattgccgcgatgccaatgaactggctgccgagcttccggaaatggatgtggtgtacctggaccctccctataaccagcatccgtacggttccaattatttcatgctgaatttgctgtcttcttatgaaaagccggaggaaaccagccgagtttccggcattcccgcagattggaaacgctccatgtacaacagccgtcagcatgctccggaggccctgttccggctgctggaggattgcccggccaaatttattctgctttcctacagctcggagggattcatcaactatgaggaaatgaccggtttccttggacgcctgggccgtaccgttacgctggaaacgccgtatgccgcgttccggggcagccggaatttcagaaaccgtcctcagaacgtgacggaattcctgttcctggtggaacggttttaacagacaacaggaaaggcaagcctccatgcagactcatttggaacgcttcatccgttttctggccgcggagaaaggcttgagcaccgcctatcagctttccgtgagacagactctggaggaatttgcccggtttctggaaatggaaaataccggccttgcccaaacgggcattgatacgctttcggcatttctgcggcatttgcaggaccggggcatggcccgcagctccatgcgggtggaaatggtgcatctgcgtatttttttccggtggctggccggaacgggaatactggaaaaagacccttccgtatttctggaaatgccccggcaggggctgtcgcttccccatgtgctggatcagaaaaccgtttcaagtttgcttgaaagcattgacattcaagatattcctttaggatgtagagacagagcgctcctggagatgatttacgcctgcgggatgcgtgttagcgaaataatcaattgcaaattagagagttttgatagagatgaagcttttgtccgcgtgctggggaagggggataaaacccggctggtgcccgtagggagatccgctttgaacgctttgcaaatgtatttggaaaaaggaagacccaaactggtcaggacagtgacgaaaagtcatatctttctgacaatgcgcggtcgaccgttgacgagggagcgggttcgccaaattctccgggaacgtgccagagccgcaggactggaacagcatgttttcccgcatatcctgcgccattccttcgccacgcatcttctggaaaacggagcggatctgcgcattattcaggagatgctgggtcatgccgatatttcaaccacccagatctatacgcatttggagcagcagcggctgaactcgattcatcaccgctttcatcccagaggataggaacgctaattcatcattcattcccatgccgcgttttttcacatcctcccaatcatatcataatcatttaaatattaatgcccggagaattattctaccggaattgtatttggcattacatatattatgcgaagtatagtttaggcagcattctcccattctcattggacggaaaacgcgctctgtcacttgacaaatatgcaagcatttcatagcttcattaaatgagtggcccttgccttgtccgtaccgttgccattttcatccttttttcatctttttcccttcttcatgccgaagatgaggaattttccgatatcatggaactggtatcggaaacggagaactgttccgccaaactggcccgtgacaaaaacgcgacggaagaacagaagaaggaagacagaaagcgcaggaaaatcggcattggagaaacggtcaccgttaccctgaactgtaaaaaaccgtttttactggaaccgaaggatcaaatccaatggaaagtgattgagggaaaagagttgcttgaaggcggtctgagaaaaatccccaatagttatcactcggtaacatttcaaataaatccttgcgccagtaaagaacaaattcagcagtccggagggaaagtagccattgaagtggaaacagaacagggaacagccctcccccgccctattgaatttgacgtggttttccctgaacatcttactgcggaacatgaaactttgggcgggatggttaaaggcgttcctgcggcagatatgggatttccaagggatggagattctgcacatggagtttccgcccagcttctcgtctccatccatcccctggacgtctgttttgacggggtctatgtaattgaaaaagacaaaggctatgcaggagctgccggaagcctggctcagactcattcggcggacagcatctggcgtgtaggtatcgacaatcgttttgaccagcacgacaatatcggcataaaatccgggaaaaacggggacatgcagtgggatgagattcaaagttatgacgctgacggaaatcctgtctataaacattcgtatcccaacgcattcacatggaattgcctgttcagaacataccagtttatggggaataaagaggggatatccgatatctccactgtctttcagaggttttatatagagaacagaggcaatggcctgttttacgccagaatccgaaaatttctggttgatcccgaaaaaaaggatgaatgttccgtcgaacgcactaccggcggcagccatatttttaaaccctgatataatataaatatgatgataaaatctcggaagaactgttttctgacttgttttgccgccataacgctgtttgctgtctttttttctgtgacagccttgccaacgttcggctctatcccgacagattcgcaggaattgacattccatgcagatcctgtgctgaaagaacttaaaattctgctaaaacagggagatctggtaaagttttaccaaacagcccacacccatatggggcagcttgagtggagagacatcagagggggagtttccccggataagctggatcggttattgctgatcgcccggctagcttccgcagcccccctgtttaaagaaaacgagagcacgccgttcgaacaaatgacgcaggatttcgattcggcaggagatattcgtctcaaggggaaagttatggtagatctggtcatcatttccaaaatcaatcttaggcaacaatgctctgccgtgagaaagaaagaagtggggcagctttgctccatttacgcggcaacgatgctgaagatgatgaaagaatcctacattcctgatttcgagggctggaagaaggaaaccatggaaagaaaaacggcggcctggaaaagagtgtttgacgccaaatgggagtctttcctgaaagaaagaaacgagagagaggagcgagccaggaaggagctatccatacccttcaaacagagaatgagaatgagacagcaaacaacggaagaggaaaagaaaaaggatcgggaattcgcggaacaggacgacgcctatatgctggaggctcgaaaggaatgggacaaaaaaaggaacctgtccaacattctggggtccatgggaggaaggaactccagaatcagatcattcctcaaagatggaggaggaggtttattacgaattttattggacaactaccccggcaaagccaccgaagtgtttaaatacctgaagctggcgggatatgaggaaggagaaatgatggagttggttgatcgggaggagggaaaaaccgaagaaacggaatttttgtatcaaagcccgttgggaagaaagttccttaaagagaagaaacaaaagaaataattcctgccagagcgcggaatcatgatatttttagtttgcaagggtattttatctttttgagattccttctctcttgccagatcacctttcatccttcataataaaaaaagcatgaatactttcgtttctctttgcctggtcgggagcctcagcctgggttccttttgttatgctcagtacatggataacgatgccaagaagaaggtaatcaaagatttggataatctgctcgctctgaacaggtctgcggaaaccaaagtgatcaatgccgctatcagcaaactgaattccgccggcagggatcccggcgccgcatatgacctgctgatccagtccaagaaatttctgatggaaacagaaaaggaaaaggacaggagccagggaaagagcgccaaaatcgcctccaattccatgaaggactggatggaccgtgaagcgaagaagtaccaggataaaaatgcccgtaaaggattaatgcttcaatatcaatggggtgttctcgtcctcaaggcgcgccttaaggaaaatttaatgaacgccacttcccattcctccggcggaacagcggaggaaatcctggatgttacggagttccagaagccggccatggatttgctgaatgcctacctgtccgcctgctcagaccctgattttatcgacccttcctcttccaaaaataataatggagcggccggaagagccggcgcccgtattgcggaacaatccgtcctgaatacggaagtgggtgaggccctgggcatcagcagcatgtcttccaaggctttcccggattccatgaagaaccgggatgagatttttgacaaactgttctttaccggataccggaagacccgcaacctccctgccctcaggcaggcatggaacaagagaatttccatggaagtggctctgggaaaaatcagccatgccatttcttccggaaagaagtccggcatgcagggccgcatcgccaatgcgtccgaagacgaatttgacgagcagggagccgccgttctggatcggctgcgctggcgctgcgaacttgattgcttcgacttgggagaccaggcaaacgctacgcggaatatgatggcgctcatccggacgacggtggatcccgtgcgccgggaacagggtatccgcaccctccgggataaactggttcagagcatgaagagcatgattgattctccggaagaagggagcatggctgacggttccgcttcatcccctgctccacgccctgccgtgcgcgcgcccaaaaggaagacgccctccaccacgatcacgaccagtcgtgaaatggatgatcccggtgccattggaacggatgtgccgtcaccgcccaaaccggatccaacccggagcgacgatttttttgaagacgtttaacgttcttcagacaaagatgctgcccgaacggcggtttccctgttcatggaatgcacagagcatccttgacgtccggaaccgccgttttatacagtaagggcatgtatcagccatttcaatttttcatgcccgcgcaaatcttcttcggcgcgggttctttggacaatcttggttccgctcccctgcccggcaccaaggccctgatcgtcatcggtggcacgtccgtcaaacgcctcggatatctggaccgcgtgcaggctcttctgaaaaaacagggagtggaaagcgtcgttttcgacaaagtgcagcccaaccccgtggtggagcatgtgatggaagccgcctccctggccagggaaacggggtgtgatttcgtcatcggcctgggcgggggcagcagcatggattccgccaagagcatcgccgtgatggcagccaatcccgggaactactgggattacatccagggcggttccggcaaggggcttcccattcccaacaaacctcttcccatcgtctgcattaccactacggcgggaaccggaacggaggcggatccgtggaccgtcattacaaaggaggacacgcaggaaaaaatcggtttcggttgcaggggtactttccccaccatgtctatcgtcgatccggagttgatgctttccgtacctcccaaattaacggcataccagggatttgacgccctgtttcatgccgtggagggatatatggccacaatcgcctctcccatgggggacatgttcgcgctccaggccattgaatacattgccaaatatcttccgcgcgccgtgaataacggggatgacctggaggcgcgcgcctatgtggctctggccaatacctattccggatttgtggaaaccatttcctgctgtacgtcggaacattccattgaacatgccctcagcgccttccatccttccctgccccacggcgcggggttaatcatgatttcctgggcctaccatgaagcctacgcgccctcctgcccggaacgttacgcaagagttgccgcggccatggggcaggaggcctcggtggacgggttcctgaacggcttgaacaaactgaaggaagcctgcggcgtggacaagctgaagatgtccgagttcggcattaccccggatttatttgacgaatacgctaaaacggctttttccaccatgggcaacctgtttgagctggaccgttgcaaattgactccggcggacgtggttagcatcctggaaaaatcctattcctaggaacaagccgtcgaggaaacgcaggccgggcgggcagctttcttgtatggcagcccgtccggcaaaagattgttgtcgttctgatgcgttcaggaatgccagccatttccgtcatgccggggcattccctatagagaaggagcatggttcggttggctgtccattttccatttcagcagttcccctgtaacacagcgcggctggacatgtgtcgcgccggggttgccatgttgttctcttatcgggcggccagatagcccaggccaatggcaaggagccccccggcaaagctgatgagagtgtaaaggaagaaggcggagaagttcccttccttcaacaacaggaaggattcattcatcagcgtggaaaaggtggtgaaaccgccgcacaggcctgcggtaagaaagagccgcgtttccgtatgcggcaggttccggtcgaacaaaccgtagagggcgcccaggataaaacatcccagcaggttgacagcagccgtaccccaggggaacgaacttgccgaattgacctggacgaaacgggacagcaggaaacgcaatatgccgcccgcaaagcttcccagacccaccatcatcagcatttttatcatagcggcttttctacgtttgaatagaaaataaagttccggagcaatcccgaaatcttccgggaaaaagaactgccggctacgttcctgaaaactggtctggaaacatccgtgcctcctggtgaagccctttaactggaaacagacttctgcggaagctgtcggccagtatgccggcagaacccatttcctttaacgcgtgcggataaaataccctgttttttccatatcgccagcctttttgttcttgattgcagggtaaaaccgtatttccctttttccatgtcccagccccttctcgttaccggaaccatcggaattgataccatccttactcccagcggcagggcggacggcgttctgggcggttccgtctcctttgcggccgtggccgcccttttgtttgccgaccgcgtggatgccgtcagcatcatcggggaggatttccccgcccattatgaagcggcccttgaggccaaaggagtgtgcatgaacggggtagaacgcaagaaggggccttctttctcctggaccggggaatattttgacaatatgaacaagcggaggaccgtttgcgccaatgattccgtgatgctggaatgggatgtgcacgttccggagcctttgaggaaccatccggttctggtttgctgctgcatggttccggcccagcagctcaagtgcatggaacaatgtccggacgcggcgctggtgctttccgattccatggacaagtggctgcgccgccagccggaattgctggatgccgtgatcagccgttcccatatcaccatgatgaatgaggatgaggcgaaggaatatgcccaggcgtccaccgtcctggaagccggggaattcctgctttccaaaggcgccgcgtacgcagtggtgaaacagggggaatacggagccacgcttctgggccgggatgtcggcgggaatctccggatgttccgttgtcccgcctatcctctgaaaacgctggtggaccccaccggcgcgggggatacgttcctgggggctctggccggctatttgtccaccctgcctcccggccttcctccgtttgaggaagtgaagaagggaattgtgtatggaacggtggcggcctccttcacctgcgagtccttttcggcagatgctcttctttccatgaccaaagagacctttcgccgccgtcttgaagagtacgcggagatgtgccgcctgcctgatatccggctcttttccgcaagtgactgttaagacgggatcagatctcctgaaaaggaggaaataccgcccttgatttcgttttccggtctccgtttttgcgggatgtccggaatgttcaggtaaagaaagcccggatgcggaacatgaaaaaccccggcgtggcatgcacggccggggtttccgtaaaaacaggggatgcagtcggcgggatcaagcatcctgaaggccgaatttaagctcggcttccgaaaccacctgtccgttcaccaggcagcgtgccgtcgcctggccaatgtttccgcgcatcttggtcagctccgcttcaatgatgagcgtatcgccgggaaccacgacgcggcggaattttaccttgtccgcactcatgaagtaaccgagcttgctggcattgccgggctggcgcagcatgacgatggaggccacctgggccatggcttccacctggagaacgcccggcatgaccggatggcccgggaagtggccctggaaaaagagttcgttcatggtcaggttcttcagaccccggcacttggtttctccttcaaaaccgataatgcggtccaccatcaggaagggatagcggtgcggcagaaggctcattacttcgttgatgtccagcacggcgtctccgtacggcacgttgacgggattgggagccatttgctggttgcggtggtgttccttcttgagcttggccgtgagttcggtgttcgggccgtggcccggcttgatggcgatgacgtggcccagaatgggcttgccgcacagggtcaggtccccaataaggtccatggccttgtggcgggcgaactcattgatgaaacgcatgggttccttgctcatgagctcctcgccgcggatgaccacggcgttttccaggctgccgcccttgatgaggcccttttccagcaggggcttgatgtcttcgtagaacgtaaaggtgcgggccggggccagttccttttcatacgtttccggcgtgatgaccgcgtcaaagtactgggtgatgcggttttccggtcccacgcaggtgacggaaacgcggaattgcttggaggggagaatggtcaggatggaaccgcccttggtttcaatggtgacggcctcgcgcacttccagatagcggcgcggcacatccagttccacgatgccggcgctcttgatcagttctacgtagggggctgaggacccgtccccgatgggcggttcattggcgtccatttcaatgacggcgttgtcaatgcccatgcccgtgagggcggagagaatatgttccacggtatgcactttgacggaaccttcagccaggctggtggcgcgttccacagtctgcaccttttccacgtccgcgctgatgaaaggctggtccggaatgtccacccggcggaatttaatgccgaagtcggcaggagccggcttcagggtcagggtaacgggctgtcccgtatgcaaagaggtaccggccagggaggccggagagccgacagttctttggtttccacatgccatgcggggatgctagtgaatgagcttccgtttggaaagcacgaaatcacggattttcctttaaattcggggaagaggcggcatgccggcgtgtcatcccggaaagaagaggataaagggcgcttgaaaaaaagccgctcacccagtagtgatgttccatgcacatcacagcaggcctccgcatttcccgtgcgtttattctcggcgccgggctgggtacccgcctgcgccctctcaccgacattctgcccaagccgctgattccctttttccatgagccccttattctgcattccatgcgccgatgctacgattgcggcatacgggagttcatcatcaacacccaccatctggcggcagcctgggacaaagtgttccctgaacattcatggaacggctgccccgttcatttcagccatgaacccgtgctgctggattccggcggcggcgtcaaaaagatagagcccctggcttccgcggaagagccgctgctggtggtgaacggagacatggcggccacatttgatctgggccgcctgctggaggagcatttgagccgccgccctcccgtgacgctggccctccgcacctccggagataagaaaaacgtgggatttgatttttcttccggcctggtgacggatatgaggcacgccctgggccgcgaccccggatcctaccaattcaccggcgcgtactgtatggagccggaaatattccgacgcatcccttccggggaagccgtttccattattcccctgtttctggattacatccgggaaggacgcctgcgcggcattctggcggacgacgggttgtggatggacatgggaacaccggaggcctatcttcaagcccatctggatttcccatcccccgttccacgcatccactcccgggccagagtgtccccccgcgcctttgtggacggccattgcgtgataggccccggagctgcggtagaggacggttgccgcctgcaaggctgcgttgtctggccgggcgtatgcgtgccttccggcacttgcgcggaacgccggattttctattgttcccccaccgattactgacgatgctttttctgcgcctgcttcccctgatattgtgcttttccggcctggttcacgcagaacaccgcgttttcaccaggaaggacggatttttgtccatgcgggacaagctgaacgtgtattttttccgttctgatacgcaccgcctgctggtaagggatgaagggagcgtcaaaacgccccggtacggctccctggacaaggccatgaggaaaagcccctgcgtggccggagtcaacggaggattcttcagcgcagacgcggagggaactcccctgggcctggtcgtccaggacggcaaacggctttctccgctggccacgggatccttcgctgtttccggtgtcgtttacgaaggaggcagagacggattaaccctgatccgcagttccgtgctgaggcgcatgagaagactgccggccatgcaggcggctatccagggggggccctttctggtggagaacggctccgccgtaaaagggcttaacgcgcagaagtccacctaccgcaccttcattgccacggacggcggcaggagatggtgcatcggcgtttcctcctccctgactctgaaggagctggcagcctggctggcggctcccggggcattgggaaatttccgggtggaaacggccctgaacctggacggcggctcttcttccgccttctggtgccatgaaacaggcatttcctaccctgcgttcaaacaagtcaggaattatctgggcgtagcccccgtggaacgccggtaaactccgttctccacgggaccatggacgcgtttccctgcgcctatcctgcgcagcagcagaaccgcgaacatcaggaaacacaccagaacggcccagtcgcccagcatggcgtacagggttatttccgtacagcccacaggcaatgtggcagccatcacccctctggtaaacggagaaccggaggaatcccgcaaatccgcaataaccgcgccattgggggccagagccacgcttacgccggtattggcggcacgaaccatggaacggcgcagttcaatacagcggaacgccgcattgcgccaatgctgttcattggcgcaggaacggttgaaccacccgtcattggtcacgttcaccattaactggggttcctgccggacgaagcggcgcacccagcttcccaccacatcctcaaagcagaccagcggaataacgcccaccgtagaggagcttccggggcggataggtacgggaacggggctggaggaacgcccgggcgtataattcaggcccatggctgttccggcggaagcctcaaaggctttttccagaaacgggaatgtttcccgcatagggatatattcaccgaagggaaccagcatggccttggcgtgcggacgggctgtggaataatccccctcaaagacggtaaggcagttgtaagcccgcgccacacgcccctcatcagacaggtaaatatcatccgtgcccgtcagcaggataaaattgcatatcccgttccggagggcctggacgtaatcctcttccgcgctcagaaagttgacattgtcctgattggggaagcgttcccctgtggaatcacggtaaaacgtggaaatggggaaggaactttccggccagatgacccatgccggcatatccagggaggcttccgcgccgtttttgaccgcctgttccagagcgcggttttgaagatccagcattccctgttccgtcatgtccagcaaagcccggtaaatgcttccccggttggccggatcccatttttccttctggctcagattcagctgcacggccatgacgggaacggtaagcctgccgtttcccgtaaccgcggcagactggggggagtagcgagccgtccagcacacgccgacgacaaacatggttaaaagaaccgccaccaggatgaaaaagtcccagggaacggtacgtctgccttcatggacaatcatggttccggcccggcggcaaacacgccagagccagacggaaaagacggccggaataaaggccagcgccgtcacgccaaagtattccgcccattgggccagtggatttccgtacagggccactcccagattgttccagccgaaacccggtatcagccaaccccgcccccattccaggcatacccataaagcggcgcccgccagagcggcggaagcactgggcaatatgtcgcccatggcccaggctttccaggcggcccgacgttcctttgccgccagcttcgcatcaggcagcggccgggcgtccggacggaagaacactcccatgaccagagcccagaggccgggaaataggcctccataaaaaatcatcaggggaatatagcccagcgtgctgacttcattgacccaccagaaggagatgccgtaaaataccacgccaaatacccaaccatacagggcgtacgccagaattccccttttcccctcccgtctgcggccgtaccacagggctgtcagcaaaggcaggaatcctatccatacgcacccgctccagtctaccggaataaaggcgcaggccatcagaattccggaaaaagcggccagcagcagccctgcccacacgggcaggagacgagggagggaagcaggtgggatattcatcgtgaaaagccttttattccgggaacgggaatgccgccattgtcccccatgctgactcattcctgcaacaaaaaagattgcaaaatttactcaaatgcggaaatagtgggcgcagttcatacaacccatcatacacaatggcagatatcgacgaaaaaacacctctaaacgtccccggcaaattttacgtggacagttcctgcattgactgtgacctttgccgcgaaacggctccagaaaactttggacgggatgacgatgaaggagtatcctatgtcaagaagcagccggacaacgacgaagagctgagcgcctgtgaggaagccctggaaggctgccccgtggaagcgattggcgacgacggcgaataatattcccccatatattattttaaccgcccggggctgttggtattcaacgctccgggcttttattttccccctatgtcctccccctggtttccctacacgccggacagagaccgtccggatccccacgcctctcccgtccggtatgattatctttcccgtgacgaacaggaggtgaggcaggcgctggcggactggttccagatatcccccgccaccagtgaaacacgtaacctccatacggcggaatccctgctgggggatattctgtccaagcttcccctggacggcgacgggatggatcccgaattgctccgggcaggatggctgaaagctgcggggccattcctgggccagcaatccaaccttctttccattgtcaagggagtggccaccattcaggtgcttcaaccggccatgcgctaccatctccagcagtggcagggagccctgctgggaaaactgaaggaccagttcggcaaagacgccgttcattccatccgcatacggataggataattttatactgcgtaaaatgttttcttttgcaatttctctgtttccttgaaaaatcattcatcattcacgtgtaatatttgccatgcgattatccctttccgcgcctttgctggcttccggcctgatgctttgttttacctcctcccatggagactggacatccccgcaccctctccagcaggaaaaagccgctccggtcccactgattcccttcccgtcccaggtggactggaaaacgggaacatgccctaaaaaggctcccgtttccgtgaaaaaaaacgcgtccctgtccaagacgctgggcaaggaagggtatgaactgcggatccgccccaacggcattctgattacggccgctgacgatgcgggcgttttttatgcccgcagaacgctggaccagctgggagccaggggagattacccgtgctgcgacatcaaggacagccccgcgttcgccatccggtgcttcatgcatgacgcaggccgccatttccggactgttgaaacactcaaggcggatattgatgaaatggcccggctgaaaataaacgcttttcactggcatctgacggattaccccgcatggcgcatccagtgcaaaaagtaccctgttttgaatgatccctccaagaggattcagggacgggacgttaacggcacctactcctacgaccagatacgggacttattccgctacgccagggagcgccatgtccagattattccggaaatcgatatgcccgggcacagcacctattttaaaaactgctttggcttcccgatgcatgatcccagaggcatcaacattctggaagaactgctggaagaattttgcagggaaattccggcggaaatgtctccctaccttcatataggagcggatgaaatccgcattcccaacggaaagcagtttgcggaccggatggcggccaaggtcaaatccctgggacggcagcccatccaatgggcgggcaacaatgacctgcctgtgtccggagacagttatgcccagctgtggaatgatgaaaattccgtaggcctgccggatccagccaggcagaagaatccctacttcgactccacggcaggatacgtcaattcctttgaccccggcattctggtgcgcaggaatttcttccgccagccctgcggaacggccaggggaaacaaccattccctgggcgtcattcagtgtctatggccggatacccgggtggagaacaaaaaaaacattcctgttcagagtccccagtggcctgccatgttcgccatggcggaacgcagttggaaaggaattccagaggatggttcccgttttgccggcagtctgccggaaaagaacacggaggcttatcaggccttctctctgtttgaaaaacgcatggaagccctggccggaagcaggcctttcccttactggagggattctttcgtggaatggacggtattcggccccgttccgcaggacaggcaggaagaagtaagaaataacctgctggcgggcaaatctcccgcagggttgtcttccatccagacgcgcggaggcaatttgtatttccgtacccgtgcgggtgcggagggtctattttccaagacaaaaccggggaatacggtatgggcggagacgacgtttcactcacccgtggagggcaccatgcacgctatggtggggtttgacgctccggcccgttccacacggcgctgttccggagtaccggctgccggggaatggtcccagtgcggcaccagaatatgggtaaacggcaaggaaatgaaaaatccccagacttacaaactggcaggccagcggcgttacgaaaagcatacatggaattcgcccgcaaatgaaataccctttgacaacgaggaattctggtgggcccggcctcctgttccctttcaagtgaaggccggggaaaacaggatcctgatagaacaaccgtacacaggagaattccagtcgtggggagttagcttcattccggtgaaaaaagcgggagaccgctggattgccgacccaagctattatgccaaacccaggagagagaaacaggatgacgtctctccggtgccatcaaagtaagcgacaaggaacactcccggcggagcttcccgtccattgtttcaaaggtcattttcccccgctcatcaggacgagggaacaggggaaacagcgtttgaggaatacgtaaacgctccgcgccatcatgtaaaccgcgggaaccaggcaccaccacgcccaggcaggccagggggagggaaaacagctctctacgcccatcagggctatcagaacaaaaatatgggaacaatacacgaaaaagctgccggacgcccaccgggccagcttttccgaccagccggggctgacggcttttacaataattccgaagctgaggaaggccagaacgatcaatcctgaaaaagagccgtccgcaatcaggaaagagtccgtacagcttgcccagacaagaaccacggaggctaaaagaatggaaccatgcacggcaaggggcatgttgccccagcggttcagacagcccggtgcggcggacgccagcataacgccgagcgcaaaatcaccaaacatgtacggactgggccatgccagggagtcgtcccaccggtgcagaaacaggcaaaacaggccaaaggcgtaaagagctggacggaaacgggagagcaaaaacgcagccagggtaaacatcatcaagtctctcaggaaccacattggggtcagcatgggacatgttcccagcccaaacacggaagccagcgaaccaggggaaagaggcatgcccgccgccagccaataggccgcgcaccagaaaagataaggccgcagcaaaaccagcaggcggcgggccgcccacgttccggccccctgttcatcaaggccggaggcggaaaaataccccgccagcaggaaaaacgtcgccagcgccggaccaatcagccattggttgggaggaaaccccatggaaggaacgtgctgcatgataaccaccagcgtcgccagcagccgagcaatctccacccaaggcaaacgagggtgaatttctttaccggacgcaggggagacggtcatgacagccccattctggatgattgctttaaaaaagcactattttttattgattttatagacgaaaagcggccttatcaggccttcacaggcatcgtattatggaaaatacctgaaaatgatttttttctcatattttcatttacggctttatatttccatatgggaaacagcatttctttctgcacgcattccgagcgcagaggctgcatcaatacacgctcctgcactggatattctctgattttgccgaaacagctgctgccacaccacctgcattgataaatggtgaaatgcatctgccatattgcaggttctcccgaatggttctcccattgcaattccgtattttccattcatcaatgccgtatgtcgcgaacgcctccccttccctgcccgatggttcgtaaaatcatcagcggctcctttggggaatcagggctgaagctgccgcaaggacctgaaggcccacaaaaaggaaaaaccagaaccagccaccttccacaaaaccgtaggagtgcaggccaatccccatgaggttgacaccgaaccacccccaggctgctacgatatttccgagcgaggcaagaacgaggaagccttgacaggaacagacgtgtaaaaggcgggcatggagggtgcaggagcaccaaaggagtgtcattaaggcaccgttttctttagggtcccatccccaaaaccgtccccagctcatgtcagcccagatgccgccgagcattgtccccagaaaacaaaagaagagcgccacgagaaggatgcgatagactccgcaggacccggctttcagccccttttcaccctgtccgaagccgaagaaacgggccaccagatgatatgaggctaaaaacccggcaaaaaaaacacttccgtagcctatcatgatggtcattacgtgcatggtgagccagaaattcgaattgagaacggcacgcatcatgcccatggtatcgccgctgtagggcaaattcatggctaccagcagtgagagaaggccggaagcgcaggcgaccgcggcaacaggaagctgacggcggagaatataaagcgtcccgccgaataatgaggctaccacgcccgcaaagacgactgaggaatacaaattggtaaccggggggcgcgattgaatgtacatgcgggccgcaatgccgaataaatgccataataccgccatacacagaaagaccgtcgcaaaatgcagcaatgccttccgccgcttgagaaacagagagactacgaaacaaaccaacgacatgccgtagagaaggaagcctccaaagaagggttcgagagcattgatgcaatgctcgaaatgcagtttgaaagaatccatgggcagtattgactccaattccccggaaagttgacgcagagtctctgcagcagtagattcatctccggcagcataggcatcgcaggctgcggcataggctttcagggcggtccgcccggcgggactgagatttttttcgagcagagcagcagccggagtcaggtagcttccctcatgtgggattactcgcagggccacattcgggtccgcttcttctacctgcacaagagcctggaggaattgaaaatagcgattggcacggtagagccggtcaagcgagggatggcgtttttcgcgttcagcggcttcaagctctgctgaagcttcaaccatagcttcatgccatgcatcaagcgtccccaaacagcccgatgtcccctccaggcggagagcgagcgcaacgccggcctgctcataaacggcgagtgcgcccagtatggcttccgcggcatgggcctgatgagaattgccccgcagagagccgcgcagcaggccagccttctcaactgcatcggcataggaaaaataacggcctcgtccgccaaggaattcgaccatatccctgttatccgaacgcagaaaaggttcgccggccatttttgccgggcaggcgtttaatgccagcaaccacttcaccggcccggtccgagagcctccaagattcaccgacgtgcggccgcttgccaatttaagggaatccgccgctgcgcttgaaaccggcatcactcgtcctgccttcaggcatggaagcgctccgggtgagggcgcccctatgccgtcaaatgaggaaaaagaatcccccaacctctgaaacagaggcgataatgcaatcacaagagcaacgaaaaacgccgtaaataaaataattttacactgcatgtttttttcgggcacgcagggttgagagaaaaatcagcagcatgcccgcaaatacgccgggcaccgatatccacggaaaaaagcgcaccggattacgtacggctgtgattacactcgtgcggcccccattggcgtaactgttctggtaaaaaatccagcctccaaaggagaccggagcattcatgcgaataaccgtttccgtgctttccccgccgcgcatgaagcaaacctcacttgaaaagctgctggggatatcgcttcccgtccatgtccgggcatcaaattttttcagctttactgaaaaaccaagggggatatttttccttccattccctccgcctgccagtatttcgtgtgagacctcacctgcatccagaacgagtattccctccgtacgcagaaaatactgcaacgcccccgccaaaatcagcactaccagaaaggcatgcgtgaggctcacgcccacgccgcgcagtgtgaagcgcgcacgccggaaaacagacgccgaaatattcagtacggccaatgcccctacgccggcgccgccaatcagaggaatcatcccgaaggaaaggcagccccagctttcaaaatacctggcctgcacagcggaaacaccgatagaccgcgcctcaagagtgccgagaaaaatgagcaacacggcataagccatcagcgcgcacgcgagacggggagatgccatccactgcaaaattttcttcatcagcagatcctgaatgaaaaagggccgcacgcctctgccgctccagccgggaaacggaagcatagggtcgtgcggcctgcttcgtgatgaataaggacggaataattattttttgtccgtgaaggcagcttccacttcagagatcatcttgttcagagaaatgatgccgccgccggaaagataccatacctgcgggtcaagcaggatgatggcgccgtttttagccgccttcgttttgttcacaagcacattgttgaggacattcggatttttggccgaacggccgatagcaaccgaacggtccaccacaaagatgatatcgggattgagcatggcaacgtattcataagtcacctgctgcccatgaacccccaccttgatgtttttatcggcctgggccacccccagggcatcgtgcaccaacccgaagcgggaacccgaaccgtaagcgcttaccttgccgtcgttcgtgaggagaacgagagctttcttgccgctggcctgggccttgtctttcgtacgggttacggcttcatcaatgtttttgacggcttcggctgccttttcgggcacgccgaacacatcacccagaagcctgatgtttttcttggcttcccccagctgatccttggccagaatatcgaccaggtaaacgggggcgatggaggaaagtttctgataataatcctgctgacgtcctgaaataataatcaagtccggcttgaacgcattgatggtttcaatattgaattccttgaccgttccaagatccgtatattgttctccggagaatttggagaggtaaggaggaaggaattttttgggtaaagccagcgcgggagtgacgcccagttcgctgatggtctcaagcgaaccgtagtccagcacggcgacacgtttcggattgaccggaagctcgaccgtgcccagcgtgtgcgtggcggtgatcgttttggcttcatctgccgcggccatggaaagaccgggaagaatcaatgcggccagaaatgcggtgattgttgttctcatattatttgttattgtttgttgtttttggaatttaaggaaattctattcatagtatacgcatatctttttatcaccatagggttctatggcgatatccataccgtaaatatcacgcagcacatctgtccggatgatatcttctgtcggcccttgatggcacaggactccgtccctgaatgccaccacgtaatccgcatagaaagagacaaagttaatatcatgaattacgatgcagatcgtcttgccctgctcccgcaccagggaacgcagcagtttcataatgcgcgccgcacgatgcatatcaaggttgttcaaaggttcatcgagaaagatgtacttcgtgtcctgtgcaatggccatggcaatataggccatctgccgctggccgcccgaaagttcatcaaggtagcaatggcgcaaatcggcaatctcggtaagttccaaagccttttcgatttgcagaaaatcctgattttccaggcggccgcgggaatgagggaaacgtccgaagcgaaccagttcctcgaccgtgagccgcgccggagtatggagggtttgccccaggatggtgagggttttggctagctcccgggaatcccatttcctgagttccctgccatcaatggatacagagccttctgtgggttccagaaggcggctgataatgttgagcatcgtgctctttccggcgccattgctgccgataaaggccaccatccgatcagagggaagcctcgtgctgacgtgcctgagcacgaaggtttcacggtattttttggaaatgtctcgtatctcaatcatatacgtttaattttcatgatcaggtagataaagtaaaccccgccaacgaaattgatgattacgctcaggggcacggagaagttgagccaccgttcggtaagcagcatgccgaaagtcaatgcagctacgcccacgagagccgtgccgggcatgaggacaatgtggcggtaggtcgggaatatgaagcgggcaatgctcacgatgagaatgcccaggaaagtcaccggccctacgagcaccgtcgaggccgaggccagaatagagacgatcatcagggagcgcagcaccacccatttgtagttcacgcccagcgtaatggccgtggagcggcccagcgtaagcacatcgagcttcctgaggtcgcaaaccagccagatgaccgtcgcggcgatcacaagccccgccgtaaacagcagttcttcattaatgcgattgaaactggcgaaaagacgcccctcaagtatggcaaattcactcggatctatcagcacctgcatgaagttcgacaagcctccgaaggttatgccgaagatcatgcctaccaacaccacaaaataaatattgccgccattctgtccacggaacatgtagaaaaaaatacccgtagatacgcagaccatcaacaacagggctcccatgaaacagagcgggctctgcatggtcgtcaactgtgtgctgcccacaaagtagagcacgagcgtctgcagtaatacgtagaggttatccagccccattacgctgggcgtgaggatatagttggttgtaatcgtctggaagacgactgaagacagccccacggccgttcctaccagcaccagcgcaataacgatgggaatgcggcgggccatgttaaagtcccacgtttcgggggtcatcccctgaaagacatatacgagcgccagccccacgcagagcagacccagaatcaggaaggccgggaacgcgcgacgccggccggcagcattgcggaaggcatcatctttttgatgttgaatggaatcaggcatacgtttttctatggaagagcatggtcagaaatacagcaccgccgaccacgctcaggataacgccgatggggatttcgaagggggcgataagcatgcgccctgccacgtcgcaaacaagaacaagcatggcccccagccaagccgtatcagacaagattttcttcacggcatccccccggaaaatgctcacgatattgggcacgatcaatccgatgaaggggaggtagcctacctccacaatcgtgattgagctgatgatggatacaatcaccagtcccatgtgcatgatgcttgcgtggttcagccccaacgccaccgcggcatcgcgccccatgccggcaatcgtaaagagatcggcataaacataggccagcagcatcaacgggatgctggcatagagcaattcataattaccctcaatgacaagggagaaactcccctgcagccatgacgccatattctgtacaatatcaaactggtaggcataaaaaacggctccggcattcaccacgccgcccagcatgatgcctatcaggggcaccagaatgacattctggtgccgcacacgcgcaatcaccgccagaaagcatgaggtgcctatcagagcaatcacaaaggcggcccccacgcgccaaatgggagaggctccgggcagataaagaatggcgatcattaccccaaagcggcaccactccatcgtgcctgccgtagtcggcgacacaaagcggttattggtgatgcgctgcatgatcaagccgctgatggccaggctgctgcctaccacgagaatgctgcagaggcgcggaatgcggctttgcagcatgatctcccaccagaactgcagctgctcgccatccatccgccacaggtcggacaaggacacttgagccgccccgataaagagcgaataaaaggcaaggccaagcagaaagctccactgaatgattctgaatgccattttctcaggctttcaacacggctgcatcaagttccatttcaaacaacagattgtcccggcacacatcggcctgtatgccgatgcagggcatgatggcgaggccgcggcgcagagctattttttcgtagtgagaggcataatccttgtctttgaaataggctacggaacggacgacatccttccagcccatgccgcgtgatttcaggatggcttcaatcacgtccagcgaaagctctgtttgtttgtcgatatcgccgagatgtacggattctccgccaggggaaatgctggccgtgccggagacgatgacttgccggaagagagggtggtccacttctaccgcacggctgaatgagctgcggtaatcctgagccgaacattgcagaggcgaagggatatcttttactgtcacacggtcgcccttaggccgaatggcaaatacgcgggccgacaaggccgcattttcccgattgccggaaccaatccccgtactggccggaaccagacgatcaaacacgccgcggctttcaaaaaatgtgtcgcgggcgcggttgaactcttcataccagtccagcaggcggttattgtaaaaccatgtgcggaccacatgggaaaaatccataccggcccggttcagcgcttcttccatctgccggaatacatccaatgtctgctcggttcgtccggctgtccggtcacggggcgacaaaccgcccaaaacggcatactcggcatattcatcctcataaaaaacgccggcggagcggccattgaactcaatcgcccgggcatttaccccctccaccgcgcaaatttgcatacctcgatagaaggatgcgcccgttttcgtacccaaaaaggcagtcatccccgccccgggcaccggggagatatccagatcagcgctgccatacacttccgggccaatccaccggagaccgtttttttcagctttttggagtaattcggcatgctcggccaactgcccaggttcgcttccggcgagcgtaacgaattgcagagatgcgccttcgccgcccagcgggagcgacttgacggaaacacctttgtttttttccaggttgcaggtcatgagtattttcttttttaaagtgctttcagaaattgaatcagctggccgcgctctttggcggagagatggcggaacatttcacgggagaattcgctttcgccgaagtgccacaggatggcttcttcaaaatcgcgggcgcgcagatcatggaacatatcggtatggttggcggttttgtgcatcagcccccttccccagagaggcggcgtacgccagaaacgagaacgcccgcggttgatttcccccatatcgtgacgcagcatatccgtataggggcggatggtctggttcgcatagccgggaagcggtttgtattctcccgttgtccattcaggcttgtggcaaccggcacaccccagtttattgaaaagttcccgcccgcggctcacgtcaggcttgtcgaggttgcgggcggcaggcacggccagtccgcgatgccagaccatgaaatcctcatactgctgcattgagagttcctcttcctgcgcgccttcaaggccgcttacatcaatgccaagctccttctgtttttcgagccattcgggcgtcatgtagatgttcgggcggttcttgcgcgttacattcgtcacgttccaaagcgcattggcgccaggaccgttttccagtgtggcgcgcgagcagtcccacgtgaacttgccgaggcgccgggtgccgtcgggttcgtcaatccatttgccatgcctccccttcaccggtcctgtcatgctctgctggcgcctgtattcggcaataatatcctcgtcgcggatggcatcaagcagccccgtcccgtaaatgccgattgttgattcgattgacacgcggtagtcggacggaagcggcagcagcggctcaatcacatctgccgtgggataagtcaacgtgccctccgtcggtttgcccgcattgtagggcgttccgtccgggtatttgttcccatattggtcgacaaagtcatgccattctattttcacccccttggcataaggcacaaaaggaggaaccgctttcgtctgcagcatgcccgtgtaacccttcaccggggaaccgtcgggattatgtacaaaggccagataaccattgccgtactgcttgtcaaaattgccggtgcgctggccgcggccataaccggggtggcaggccagacaggatgatttaatgtaagtggggccgagaccgccgaagcgattgcgcttcacgggtacgaagttcccttcaaaaataatttcgcccgccttgaaacgattcgtcaggccggcttcagtaattgccggcgattcctgctcaaacgctttactggtggcattaaacaccgttcccttttcaccgcccagatagtaagccggtccgggatcgccatctttcgtcctgagcgcggggggcgtgaaatcacggccgcggttcacatggcagctcacgcatgaagctgtcatgtattcggctttgatattgtcaaattttgatgcactcccctgggccggattaatcagtgcgcgtccggaaatgcggggatgtcccaaaacgccggcattccttgccgtgtccgggataaaagattgttcaggagccgcatccccagaacctccggaattcactattgcccaggcggccgctcccgttccgagcaccaggacagccgcaggttttgcaaattgtcgatactccatgtgcattgatgattggcaggctttccagaaatacggcccgtggtacacgtctccgtcagccggccgacaatatgatattgcagcccagggccttgccgaccctgggcaatgcgggttaaattacttcacaagaagttcctgaaccttgtcgaggttttcggaaagttccttgcaactgtcgatgattgccttgagctgctcctttttgtcgagatttttcaccaggggcccctgtatggcgtcaaggctcttgaataccttggcgatagaacctttcacagccaagtcaaccttcgcggacttggcggctacgagaggggaaatcacattgtaggatttttctacgctctgtacgttgtggcgggagtccaccagagaagtgtagctgtaaagggattcacagtcggcggcgtcagccgtttcgtagggcttgcccacctttgaatcggctatttcgtcaataatgtccttgctgccgccgatgatttcatcaagcacttcagagtttgactcgtagcggctgcctgcctggccagcttttttgaattcccccgcataggacttgccgggttctatttcagcttcttcaagaatcttggccttctcttcgctgatcttgtcagaacccgcccaccaggcttcaagcgtgatggcatcctctgcaatcacctcggccacagcggcaaggtaggaaagctgtccgggcgtcagatcggcggccttgcggggttgcccatctcggaacaagaggtattcggcagcatggaaaccgcgcgtttccgcgccgagggaattgcggacgtaggcggcgtcaatcgttacgctcttgctgtccgcgtttttggcgacggcgtcaaggttcgtggtatccaggggccaggagtccagcttcgggtcaaggttggcgaaagcagccggaccaaagaggaaggattccgaaagttcccacggcacgcgcgtttcaagaagaagcttccctgcttcagcaaccttggcatcggtaggagcagccttcagctctttagcggccttggcgaatttgagagcgttatcactcatcgtcttgtaggtgggaatgacaagctcatccgcgtaggcggcaatcgccgcgctcgttttgtccaccttgggggaagcggccttggccgcctgagcctggctaccgaaagccaggattgtacttccggcgcaaaagccggccagcaacatgcgtttgtatgcgttcatggttttttattgataatgaaaacatccgtatcctcctcagggaggcatcctccaatccggcaggatttcatggcatatccgccattttttcccgccggagcggaaaataataatccggccaaacgatgtcaattaaaaattagtttaaactaactttgcaacaaaaaacccctcttgtggccgcatgccggaacatccggcatgttattgattcggaaatattttctgtttccgaatgcgcccaggagccgcctttcaccaaattccgagtttctccgcgacaaggctccttacctcgccaaaagatttcactacgggcggattttccgtatggcctccaagaaacttctccatccagatcatatggtaccagcggccgaatttgtatccgcaccgatgaaatttccctgcaaattgataccccaaacgtttatggaactggacgctgtcccgtgtaagataggggtcctcagcttcacagggataagcaatgcacgcgtttaaattcaaaatattctgcatggagagaatcttttccagagctgcatacagttcccttcccgttcccatttttttcatgtcttcccgcacgtataccgtcgtttccacagcccagcgatacgctgcgcggtccttgaacactcctgcataggcataaccggaaatatcccctgccctttccgcaaccaaataggggtattttcccagtatgtgatctattcttttttcaaactccgtcactgcaggcacttcatattcaaacgtgacagctgtcttttccacatacggagcgtaaatttccagcagcttggccgcatcccgcctcgttgcaattctgattctgctgcttttcatttcggttgactgtgctgggcccctgagccggaagcgctgccgatcattctaatatttcacaagcgattgtcaatttgaggccgcccaagcacccgccatttccgggaaatatcatccgccgcatgttttccgccgttcccgttcatgaacgggaagaaacggggtcaatattcatttcaaaatcagagtaaaaaccgcattttttaccttgtccggtaccccgtgtccatttatggaaagccctcccgaaaaagtgaaaaaaggccggagtccatagagaatccggtcttttggaaaggataggatgccacttcgcggcgaaatccgtctcaggagtaaaaaccgatgtccggttcccggtcccgccgcctgcgtttaaaatacggattgcggtagcggtggatgcatttgccggaactcccaggggtataatgaagaggggccgcctccttgacggcttcacggctcaatatctccacaaaatccttcaaggacatttccagatctgcatcgtggcatgccagcgcggcggacaggcgcactttgccgttgtcatagtccacatacatggcgaacagcgtggtctggtacaggtgccacggttccccgcccatttttccggactggtgttggctgatggcctccaacagccacgtcagcgcatgttccagttccagattgtccaaaacatcccgtataagagatgtttcgcggccgaaaacggccacgctttcctgttgtcttgccctgttgattttcatgtcttggttctcctttccggtttcccttgttaagcagaacggcggataattctgccgctccaattgttttggacactttttttcaacaggttgttcaatctgaattctcaactgtgtcagccatgaccactttcccaatgtacgggagttcccggtaatgcccatccaggtccattccaaaccccaccaggaaatcgtttccctgcgtaaaagccacgtaatcagcctcaaaaggcactttccggcaacagtgcttgtccacggctacagcagtgaggacttccttcacccctcttcttttcaattcccggcaaacttcatccagcgtagcacccgtatccagaacgtcatccaccaccagaacaggcacatcgggctggaaatccccgcaatccccctcccacgccacggaaccggaatttctcattccggcataactggaaattttgacggctttcaccgcaggccgggatttcaaatgcttctccaacatcgcagcgaaaggaagagcgccgttcagcagcagcaataaaatatagggttttcctgccatggccctgtcaatggatgcggccagttccctgacgcgcgcgcagatggcatcctctgcaatcaaaggagtgatggtgtaagtcatggaaacggagtatgataatgtttcctgtaagaaaatcaatccttaaagaaggatgaacggagacaaaacattcccggccgggctccagcaaattttacaagaagcaggactggtcttcatagtcaggaggcaacaaaaaagcgctctcaagattgtttctccgccccgatcggcagagaatgcggaggcgcatttaacggtggcttcccgccggaccgcatggtaaagtaaggcagaaatgactgattccccttccaagcgcctttttattctggatggaatggccctggcttacagagcccacttcgcctttttctccaatcccatccgcaattccaagggagtcaatacttccgccgtgtacggcttcgccaatacgctgctgggcattctggagcacgaacgccccacgcacatcgcggcctgtttcgacacttccgctcccacggcgcgccataagctttaccctgcctataaagccaaccgggaatccatgccggaagagttgagcgaccaaatgcccctgattttcagattgctggaagccatgaatattcccattctgcgctatgaaggctatgaggcggacgatacgataggcacgctggcacgcatcgcggacggtacggagggattccagacctacatggtttcccaggacaaggacctgggccagcttatttcctccacctgctttctgtggaaacccggcaaaaggggcaatgaccacgaagtgattgacctggcaaagctcaaggagcaatggggcattgaacgtgcggaccaggtagttgatattctggccctgatgggcgacagctccgacaatattccggggcttcccggcgtgggggaaaagacggccaagctgctgatcagagagttcggctccgtggaaaacctgctgtctaatacggataaactgaaagggaagcgcaaacagattgtggaggaaaacggggacatggcaaccctttccaagcaactggccaccattgaccggaacgttcccctgacggtgaccctgcctgaattggttaaaagagaacccagtccggaagaactgcaggcccttctccaggagttggaattccggtccatgcaggccaagctgttcgggaaaaaagcgccggagcccagaaaagcccccctcccggcagacgatttgtttgctcccgccccccggacggaacagccttcgtcggcgaaaccctccgcccctgtgtcgggagtacggcagaacggttcgggacaaatggatttatttgaggaacgccatttgaaaacggtagatgatttcaggcacgaatatattattgcagatacgccggaagcccgttccgccatggcagccgagctggaaaagtatgattcctggtgcttcgacacggaaacgacgggcctgaatcccctcatggacaacctgctgggcgtcgccttttgcgctgaaccgcacaaggcatggtacatgcctgtctccggtccggcggatctggaagcagtcaggccgctcctggaaggccccgcagagaagatagggcatcatctgaaatttgacctggaggttttgcgagccaacggcatccatgtcaaaggcccctttttcgatacattgctggctcatgccctgatcgctccaggcatgaagcacggaatggacgttctggcggaaaatttgctgcaatattccacgattaaactgaaggacattgccgctccaggagcaaaaaaacgggaactggacaccagcggcgttcccgtggaagtaatgggcaaatattcggcggaggatgcggatatcaccctccagctttccgccgtcctgaaaaggcaggtcaaggaaagcggcatggaaaaactgttccgtaccgtggaactgcccctgcttcccgtgctggcggacatggagttttccggcatccgcgtgcttccggaatccctggagaaggcttccgtcaaggtaggagccatcattgacggcctacgggaaagaattgaagaagccgcaggccatcccctgaatctgaattcccccaagcagctcggagatttcctgttcggagaactggagctggtgaagaagcccaagaagacgaagacgggccagttcgtgacggatgaagacaccctttccgctctggccccccagcatcccattgtagcggatatcctggcttaccgggagaatatgaagctgaagagcacatatctggatgcactgcccaggtatatctgcccgcgggatggacgcatccatacccaattccaccagatgctgaccgcaaccgggaggcttgcctcccaggatcccaatcttcagaatattccggtaaggacggaacaggggcgcctgatccgcaccgcctttgtccccgcctcagaggaatacaccatgctgtctgcggattattcccagattgaactgcgcatcatggcggctctttcaggagaccccgccatgtgcggagcattcagggaaggacgggacatccatacggaaacggccgcccgtgtgtacggcattccccgcgaccaggtggacgccgttatgcgccgtgcggccaaaacggtgaatttcggcattatttacggcatttccgccttcggtctctcccagaggctgggctgcccccgcggagaagccgccactttgattgaaaactattttacccagttccccatagttaaatccttcatggaagacctggttcacaaagcggaacaagccggttacgcggaaacgctattggggcgacggaggatgattccggaaatcaattccgccaacaagaccattaagtccgccgcggaacgtactgccatcaacacccccatccagggcacggcggcggatatgattaaaatagccatgatccatgtggacaaattgctgaaaggcaccagatcccggcttatcctccaaattcatgatgaattgctggtggacctgcacagggatgagttggctctcattcccaagatagaggaagccatggtcagcgcgctgcccctgcccaacggcgttcccattctggtggaagccaggacgggaggcaactggctggaagcccattaaaaaatatcggaattatgcagaatagtcttgtcgcaagattttcagaatattttaaatattgatatttagcaaattgcttcgataaaaaatcggaaaaatcaacgaaacaagactaaagtaaataataccgaaaaatattttttcaaaagactcccacgcgttccgcattccagaattcccgcgccttcccgatgccgtattttcccttccggccgtatcggtttccagtttgtggacgagttgtccctccaacgggaaatttttgaaaagaatgattcccccgcggcagaaaaatgggtgggaaaggatatccctttgaaaaaatgaattaaagaatcagagcgtcccctgactggaattccggaacggtcaccagggctctgccgtcttttaacgccactacctgcaccttgcgttcctgcattcctgacggcgtttttacctggatggagctgccgtccctgacggcggaagcgggaatccacgcggaaacgggaacttgaacgttgatggctacttgaagagccatattgacgggagccacttgccactcggaaacatgggaggcattcggctccagggaggcaatcaacacggcggaattgcttttggaatccagcgccgcatccaccgccgtaacgcggcccagccactgcagccgttttccattattcagcacgcaagaggcggtcagagccgtattcaccttgccctgctcatccctgggcaatgcggaaaattcttccagcggaacgggaatccgtatcatccgctcctgaagaggaattactttccccaccggctgcccggcgaccacgcgggcaccggctcccacagagcattccaccacctggcaggtatagggagcttccagcaccgtatcccggagggcctgttctgcttccgccacatacgcctccgcggcgttcagcctggcgtttacggctctgcgctgcggcacccggagcaccagttcggattcctttccgcttttggagacggagctgtatgtctttttgatggctttcagggcttccgcctgctccgtagaaacatccaggcgggcctgttccagttccgcctgagcgttcgccagccgggcgcggtattcaaatttttccaattccatcaggggggttcccttcaggacaatttcccccacattaaacaggggatgcactttgtccacctttccggaaacgctgggagaaagcatcgtcaggtaggaggccttcacgatgccgggcgcggaaataaaaagagtgttcgtctgcagccggaggggtgtctccgttcctgcgggcgcgcagcccctgtttccggaggaggaaaaagagacggacggctccgttacaatagccgtgcctatcagaagcgccacaatccccaggccgatgcctatggaccaggacgttccctttttttgaggggcctcgctcatcaacagctccgggggaaacgcgtcccgttatttgggatattccgtctccatgatgtgggaataggcctccgccgtttccacagccacggtttcaatattcttcatcaactgggcaaactgggcttccgtgaggtccatgccttccagaacgaaggactggcggtaataaacatacccgctgttggggtccagctgaaaggcgccggccgtctggtccgcgttcagttcgctgaggataatgctgacttccacacggcggttttcaggaaccttggcggcaaaaagcacgtcaatgaccagcgtctccggacgttcaatcatggtgtacaggaggctcaccggggtgaacgtatcacaggggacgaatgcgatgcctgtcttaatgttgtggtcatcagcggaagtgatccattccgtctcttcccctctctttctgagaacggtgtacacacggtccaaaaggctgagatgctggttttccatattgaaaattgtttaacagggggggtgcttgcaaaggcgcatgcaacgtacgcgcccgtttactgaattcaagcttactggcatccttctgattcgtcaagctctcctgacgtaaagaaattgaaaaaacacgtatgcggacggcataaaaaatacagacgccgtccgaaagggcggcgtctggaaaaaacgcgtgcgccggaagttccggcttttttctgaggttctttttacaggatatccccgggctggtagcccgccccgtccggaaacctgtccgtcacttccttcaccatggagcggaatgcttccacctgggcgtcagccatgcccgtagcggaggaattggaatcaaaaatgcgctgaaggtccgcccggtctattcccaggcgcccgtcttccgccaggcggtccagcaaattgttttccatgattttcccggcgcgcaggtcattggagacagccacggcatgttccttgatcacctcatgggcggtctcccggccaatgccgcgcttgacggcctccatcaggatggtggttgtcatcaggaaaggcaggtagcggcgcaattccgcagccaccacggcctcatacacgcccatctggttcaacacggtcaggaaggtttcaaacaggccgtccgcagcgtaaaaggaatcaggcatgacgacacgacgcaccacggagcaggaaacgtccccctcattccactgatccccggccagaccggaaatcatcatcaggaaccccttcaagatgacgtggaagccgttgacgcgctcgcaggagcgggcgttcatcttgtgcggcatggcgctggagccagtctgccccttggcgaacccctccgtggccagttcatggccggccatcaggcgcagggttttggcgaaggaggagcagccggaggtgagttccaccagtccggaaactacggaaaagtccagagaacgcggatatacctgccctacattcatccacttggcgggaatacccaggtgggcgcacacgcggtcttccagttccagcacgcggccggcatcctgtccgaagagggaaagctggtcaagctgggttccaacggcgcccttcagcccgcgtacgctgtaacggtccatgagggaaatccatgtccccaggccgtgcacgatgtcttccccgaacatggcgacgcgtttgcccatggtcgtggtctgcgcggctacattgtgcgtgcgtccggcaatggtcacgtgcttccattgttcggccagggcgctcatgcggttcaacacggccacggccttgtcccggatgatttgcatggatttccagatctggagctgttccacattttccgtcaggtcccgggaggtcatgcccttgtggatatgctcgcatccagccagttcgcagaattcttctatgcgcgccttcacatcgtggcgcgtcacgcgttcacgcgcgtcaatggaaggaagatttacctggtctttcacccgttcataggcctcaatgactccgtccggaatatccagccccagatccttctgggctttcatcacggcaatccagaattcgcgttccagaatgatgcggccctctgcggaccagatggatttcatggcggcggaggcgtacctttcagccaggacattgggaatcacgctcatatcaaaatatgtctatgcggggggttatcaacaacggtaagccgccatgatcatgacggaaggaaaaaaagcaagcactttcccacagcttcacggattaggggcgccggggaattcaaagccattccttttatgaacttgattcagtattgcgcctccctcccaataaaagtttcaggaacaggcaaaaatttttattgccgaatgccggaatcgcaacatttccgcttatcgccatgttccctcactcccccggcggcggctccaggccgtaccgggcataaccggaaacgatttcctgaaggatggcggaaattttttccagggaacggacaggaacgtattcatactttccatggaagttgtggcctccggcgcacaggttgggacacggcagccccatgaaagagaggcgtgctccgtccgtgccaccgcgcacagggatgatttccggcctcactcccacggcttccatggccctgcgggcatgttccaccaggtgcatgtgcgggagtatcttctccttcatgttgtaataggaatccgtaatttccacctttattgtcccctctccgtatttacggttcagcagggccgcgcattcctgcatgaactccttcttgcgctcaaacgccgccctgtcatgatccctgacgaggtactccgcagccgcctgttccacgtctccccggagagaatccagatgataaaagccctcgtatccttccgtgaaagcgggattctggaacgcgggcagcatgccctggaattccatgagaaccaggcaggcattcaacatcctgcccttggcgcttccgggatgaatagaagagccctgcaccgtcactaccgtggaagccgcattgaaattttcatattcaatttcccccaaggcgcctccgtccacggtataggcgaaatccgcgccgaaccgcgccacgtcaaaggcatccgtcccgcgccctatttcctcatccggcgtgaaggcaatccgtatctcgccgtgaggccgttcagggttcagcaggaaggaggcggccatatccatgatttccgccacaccggccttgtcgtccgcgccaagcagggtagttccgtccgtcacgaccaggtcctggcccaaataatccgccagctcgggaaaaacggcgggggaaagcaccattccctgctccgggttgagcaggatgtccccgccgtcgtacgagcgtatgatgcggggggtgacgccgctgccggagactcccggagccgtatccacatgggccacccagccgatgacgggaacattcccttccacgttggaaggaatggaggcgtaaacaatgccggaatcctcatccagttccgcctgcgctcccatgtccttcaattccccggccaacagccgggccagctccgtctggccgggggtggatggcacggtggcggaatccgcgtccgactgggagcccacggagacatacttcaaaaaacggtctaaaacggagatgttcatgggaaaaatcaaggattggcaagagtctaccacccgcccccgcgaacacaagcacaagacacggtttattcttgcgattcaggacggtgtgccgtatgtaaacaaagcttctccccatgatgactcctctcccccttggcattacccttgctttgtccctgacctgcggctccatgccccttctggcccaggggacgtatatgcccggccccatgcccgccacctccggaacaaagcaggatccaacggacatgtacctggaggcgttgaggctggtgacccaagccgcaggactggtggaaaaacgggattatataggagccatccgcctgacgcagcaggcggaagacaagttcggacgcctggctaagtcttatccccaatggcgtcccaacctgctgcaaacgcgccgccagctcaacagggaaaatctggaccagtggcagaagctggcccagcagcaggccgccgcctcttcttcatccggcccaggcctggagatggaacgcccggcctccgtgccgaagcgccccaggccaaaacccaacatagccctccctcccggctacaagggcgtggaattccctacccgtcccggagaatccctgatcaaaaccatcccgtccccttccgtttctcccggggcggctccggaagtggtggagagcaattacgaacgcatccgcagactgctggataaaaccaccatggagaacaaggctctgatccaggctctcaagcgcacccgccgggagcaggaggagattctggcaaaactggccgtggcatccgccggagaatccgtttaccgggatgaattgctcaaggtcaaaaagcagatggaggatgaaagaaagaccagcaacaagcttattcagactctcaccaggagagtggaggaactggaacaaaatgtcacctccctcagccaggacaaagcccgttatctggcgcagatcgccgatcttcagctgcagctcaaggagtaccaggacaagctggacaaagtgacggatgagaaaaacgcccttcagaaagaccgggaccaattggcggccctggtggagctcaacagcccggacaaaacaaaaaacctgttggaccgcaacctgacgctggcggcccagctcaaggatgcccaggacaaaatcgccgctctggaaacagccaaatccgattccgaagaacagcggaaagccaacctgaaagcgttggaagaggcgcgtgaggaatccgcagacctgaaacagaaactgattgccatccgggatgaaaacatcggctaccgcaaacgcatcacagagttgaataccaagctcatcaatgcggatgtggaactgtccaagctggaggccaatccggaaaaaagcccgcttcttctggaagaaaaccagctgctgcgctccaccatcgccaagcagctccgcatactttccgtgcaggaccagagccgctccctgctcatcagcacttataagcggctgcatcaggaaaatccggacacggcggaaatagcctccctgatggacaatgaagaagccatcaagctcactcctgcggaaaaacaaattgtcaacgccattgccagggataacaatatcaatgttcccctgacggatcagcagaaggaaaaaatcaacaagctggcgcaggccctctctgcggaacgcggtaaggccgcccagcttgcccgggatttggaactggcgcgcagccagatgaagaccaaagcggacaaatccgccagaaacgacaagaaacaggcggaagccctggcgcggacccagaaggccctggaacagaaaaacattcaggtggaggaactcacccggcagatggaagaactgaaaagccgttccgccgaacaggcccgcctggccgccatctccgccggaaccattactccggaccaggaaaaagcgctgaaccggagcatggaagccacggtacgccggaagctggaggcggaagccctggggcaaggcgccgcagaagccttcgccaaaaaacgctatgccgccgcggaacaactgtaccggactttgctggacttccagccggcccacgttccagccctggtcaatctggggaccattctgcttcagcgcaacaaggcggaggaagccattaaatttctcaaaaaagccacggaactggacgcctcctcctcccccgcatggttcatgatgggggtggcccaataccgcgccggggaagaccaccacgccatcgcctccctgacggaaacggtcaggctggatccggccaacgctcccgccctgctttacttgggcaacctggaaaccagcgccgggaactatgaaaaagcggtggcccactttgaaaacgccctgaaaatccagccggaatcaccggacgcgcacttcaacctggcctggacctattcccggctgggccgcacgacgcaggcacgcaaaagctatgatgcagccatccgctgcggaggcttgccggattccgacctggagcttgccattaccggaaccaccacccttccccgcaaaaaacaggctgcggaccagaatcccgcatccgccgcaaaagaggacggcccccagctggctgcggcaataagcgatccgtctgccattccccacgatgccaatgaagtgcctgctcatgtggcggaggacccaaatgcgcaggaaaagccgtccgccggtcccaaacaggtcgtcgtcagccaccatccggaaaccgaccccgtctctttggcggcccaaatgagggaaactgcccctgcggcggcatccgcacaacctccggcagaagccgcaactgccgcaacggaaacgcccaagccagaaaagcaggaacctccgcgcaggaaaagccgtttccgaatcggttcctgatggaattcttccctttcccagtaaataaagccatgtatcacgtttccattttaggactgggcctcattggctcacggattgcacgccatatggccggaatgggcgacaaggtcaccgtctggaacagaactccgcgggaagattttccggaagcggttcctaccccggcggatgcggcacgcgcttccaaagttatccagctctacctgaaagacaggaatgcctgtctggaagtgtttgaacaaatgagaggggctctgacaccggagcatatcattctgaaccattcaaccattgacttggcgaccgtcggcaaactctccctgatgagttccgccatcggctgcacgtatgtggattgcccgttcaccggctcccgtttgcccgcggaaaaaggggaactggtttactacgttggcacggattccaccacactggaccgcatacgccccgtgctggagcacagttcccgggacatcctgcacctgggcggcatcggagccggcaccgtcgtcaaactggtcaccaacatggtctccgccaccatggtgcagagtttgagcgaagccctggccatctcccaggcgtacggcatttcccaggaaatgctgggccaggccatttcccggaacgtcatcgcctcccctctggctgcatttaagctgcccctgatggcaaagcgtgacttttccacccatttctccctggacaacatgaggaaagacagtatttacgctcaggaacttgccgcagaaaaaggaatccacccgcctgttgccgccctggtttcctccatcatggggaagctgtgccgggaaggtcgcgcggaagaggatttcagctgtctggcggaacaattcgactaactttttccgttgatgaaattcaggggaacatgcgtctttctgttgacggctcttcttctgctccctgccggccggggacaggaacgaaaggagcctggcaatgattcttccgcggaagtgcggcagacggaagaagaatcagcatccgtccagaatgctgattttattgatgacgcctcggaccgtccagtattgcagggcagttccaatgtaaaccccgtcgttcccccttcaccttcggcaaggatcgccgccggaacggaggaacagcccgccaaaaggcagccgttcaccagcgtttccacctccaagcaattccacgtcaccgggatggactccctgctggccggggccatcgccacccgggcggatgccatacgcaccgcgctgctaaaagtcctcaagcagcctgacgaatggaaaaacggcatcaacatccgcctggtaggagagccgggaagccccgttccggccaaccccgtcctcatgcaaaccgtcattgtaggcaataccctctcctatagcattttcattcatctgggccacggcatcaaccaggacagtctgcgccgcgccatcgtctccaccctgctttatgaaatgatgctgcgcacggtggacccggaaggcctgccggacaacgtcacgctgcccccctggctgattgccgggttggaacaggctgttctgtggcacaataatgaagctgaccgtgccatgtattccaccctgttccagcagtccggaattatgactccggaagaaatcctgaattgccgggaaccggaaaaggaactggatgcgacctcttacgcggcctatcaaacttcctgtggagccctggtgctttgcctgctgaaccaggaaaacggtccggaagggatgaaacagcttctggaccaggctattctgggcaatgacgatcccagaaacctcatcaaacgccattttccgcagctcagcctgacccccacttccctccataaatggtggacgcttcagctttcccgcatggcgacgcctcccctgacggaaactctcacgattacggaaacggaacgtcatctccaggaagcccttaccctggtcaagtatgatccggatacccgcaccaccgtcacatttcccctggatgacctggaacaggcccgttccctgccggatctgaacaggcagctttccaacgtggctggcagcctgctcaacctcagcaggcgttcctttccttcataccggcccgtcattgtagaatatgccaagctggtggccctgatgcaaacagggaaagccaacagccgggaagccgtccccaaaatcagccagcttcgggaaataagaaacctttccatgaaaaccgcccgccgcgtccgggactatatggactggtatgaaatcaacacgcggtccggaaccggcaagacattcgcttcctacgcggcagccgtgaaaatcctccgggaacaggaacagccggccaatacccctgtttcccgctacctggacgacattgaaaaactgtacaccctcccggccagggctcccgtgccctccctgcatgggaaggattaaggaattaaggaaaggcgttctgcggcggagccatcctgccgtccctatcaagagcgccgcacttctaaaaaacggcttcccgtgccgtgcaatgttctatcttcacggcatcacaaaatgccgatgagttctccccggaagccggatggtgcggaaatctggtgctatgaagagaattgcttgccggaacatgccaaatcaccggcagaaaccatgcatcacgtcatgaaccaatagactgtccgtcagcgttttgaatcattctctgcatcagcgctcatccccgccgcagaaacgcgcatttttttatgtggtctttttttattcagaaagattcagggattgtctttcccaagatgatttgcaatcatcaccccgaattattttcatatcactacataatatggacacgtcattgaaactccacggcctggtggccgccgtacacactccgttcaaggcggacggttccctgaacccttccagcgttgacgcccaggccaagctgcttgcctcccagggcatcaagcttgctttcattaccggcagcaccggggaatcctcctccatgcagcttgaagaacgcaaggaaatctattccgcctggaaggaagcctccgccaagcatggcgtggaagttatcgcccataccggttccaacagcgtctgggacgcccgggaactggcctcttttgcccaggaatgcggattcgtggccaccagttccctggccccgtcctactacaagcccggcactgttcagcgcctggtggaatgctgcgccttcgccgcctccggcgctcccgacctgccctattattactatgatatccccgtgctgacgggcgtacgcttcaatccggtggatttcatcaggctggccaaggaacagattccgaatttcgcaggcatcaaattcaccaatccggatctggccctgtaccagaccacgctgaattacgacgaaaccgtggatattccctggggtgtggacgaatggtttacgggcgccctttccgtgggggccaagggtgctgtggggagctccttcaattttgctccggccctgtaccagaaactcatgaaagcctttgcggaaggcgatgtggaaacggcgcgcgactgccagtggaaatccgttcagatgatcaatatcctggcctccaagggctatatgggctgcgccaaggctctgatgggctggctgggcgtcgatcttggccccgcccggcttccgcagggcaacccgaccgcagatcagctgaaggaactccgttccgaactggaaggcatcggcttcttccagtgggctttaaactgaaccccggaacctgactgacatggctgcaactcttgatatgccctctttgggcaagttctaccgccgccagcttctggaagacgttctgccgttctggttcccccgcgcctacgacgaaaaaaacggtggtctttaccactgctttgacgcagacggcacgctggtggactccgacaaatccgtctgggcccagggccgcatggcatggatgctgctgacaatgtacaacagcatcgaaaagaatacggactggctcaaatgggcggaaagcgccttggaattcctgaaaaccaagtgcgttgacccggcggacggccgcatgttctttcatgtggctgccgacggcacccccatccgcaaacgccgctacgcctacagcgaatctttcgccgccatcgcctttgcagcgcacgccagggcgaccggcagccgggattctgcccgtgaagcccgccactggttcgacatcttcacggacaactgcttcactcccggcaaaatggttcccaaattcaccggggaacgtcctacgaccggtctgggcacccgcatgattaccctgaacacagctcaggaaatgcgcaagtacctgggagatgacgacggcttctataccggctggacagaccgctgcatcaacgacctccgcaccctattcatgaaacctgacatccaggcagtcatggaagtggtgggaacggacggctccatcatcgaccacttcgacgaacgcaccctgaaccccggccatactacggagggtgggtggttcgtgctggaagaagcccgccatcgcggcaatgaccccgaactcatcaaggtgggctgcgacatgatcgactgggcattcgcccgcggctgggacaaggaaaacggcggcatgctgtactacacggacgtgtacaacaagcccgttcaggaatactggcacaacatgaagttctggtggccgcatgatgaagcgctcatcgccatgacgctcgcctacaagctcacaggggaagaacgctatgccatccgtcacgacatggtgcgcaactgggctttctcccacttccaggacgttcagcatggcgactggttcggctatctgaacaaggacggttccagggccaacaccctcaagggaagcctctggaaatccttcttccaccatccccgcgccatgtggtgctgcgcccactactgcggcgccatttaagaaggcgtcaggctttttcccgtcaggcggtcattccatatccatggaacggccgcttttttatgccctcaataccaaaattcagagggttccggataaaacaatctatccgtttttccaccctcaacgcaggatgatatcctccgtccgcaccaccacatcgccaggatccagcatggcgttaatcagggaacagaagcggaatttgcctatatcttccgctcttacggaacattcctgaatgtctccgcgggacagcaggaaggcgcgcttggttcccgggagcaggaaagtttccggagtaatccaggaggacccgtccccgaacaccacgttgctgtaccgcgtatccgtcaccatcccgttccggagaatcagcgcttcttcgtcacagcccaaggccgcccctgccgccagaagccctgtccgatcctcccacttgcatgagtaatccagcccgggcatttccacacacgtcagcgtctgcacctgccggggacggtagggctcaaaggaggtgcggcgcacccttccccgcgtatcatacgtgatatggcatttgtaaactccacggctctccgggccaggacaggccgaaagaacggaagccagatcgggaacgggagctccgtccgaaccatgaacgccgatggaggcttccaccctccgctggtgccagggaagcaggcagggagcgccattctcccatttaacggtttcaaaaatcaaacggcacataaactttggccacagcttcccggtattcctcttccatccggctcatgacggtaatccctccaccgctcttgtataccattccccgctcatcctcctccatgaagcggatggagacggcggaatccaaatcccgcccgttgaaaaagccgaaaattccggtataaaaccccctctccatatcctccgcttccgcgatggcccggcaggtggcttccttgggtgctccggtcacgctcccggcgggaagcagcttcagaaggatttcccccaggcgggaacgccagttttccggcaacaaccctgaaatttcggaactgcattgaagaatagagcctttggacgtttctacagggctgatatagcggtagcgttttaccttcacgccggttgccaccatggaaagatcattgcgcatcagatccacaatggtggcggattccctattctccttttcatccgtttccagccagcggcgcgcttcctgcgtagcggacggcgccgttcccttcatgggaaacgtggaaatggagcgcccgcgcaccgtgacaaacggttccggagaaaagcagacgcagccgcggccgtgcactccggaaatccgcgcgtccggccccagcagcatccggtaaggcgcgcgggcaaaccggaacagatggcgcagcgtcaggttggtttccacgggggtggacacgcataaattcagcaggtaggaatcccccctcatcagatggttccggacggaggcgaaggatgccgcataccgggacatgggctggggggatggaatgaaccgcagccgttccggaagcggagggccgccgtcctgacttcccatcgcgcccagcggcagggaaaaagcagccatgcgctccccctccgtttccgaaggttcaaacagcaggttatggcccatatcatgggaaatgacaaaaaagaacggacattccgcacggcccagggcgttcatgcggctgatggtctgttcccgtgtgtacattgtcgggaattactctatcatgtgcgcgccatgagtcaaccgaacgtctggatcatcgaccaccgggattctttcacctggaatcttgcagaactcgtcagaaggacgggaatggccgttccgcgcgtggtttccaatgaatccccggaactggaacaggcggttcaggcgggggaaaagcttatcctgtctcccggtccgggaacggtggaggatgcctgccaccgggccaccttccgtcttctggaccgcctgccccgctttaccccggtgctaggcgtatgcctggggcatcagatcctgggcgtgcgcttcggagcccgtctggaacacctttcccggccccttcacggagcgcgggaattcatacgcaggacggagcagtgtccccttctggaaggattgccggaacaatttcctgcagcgctttaccattcctggcgccttgccgcttttccctggccggctgagctgatggtcacggcgagggattccgggaaaaatgtgcaggccatccgccacaggcacctccccctttacggcattcagttccatccggaatccatcctgacgccggacggagaagcgctgctccggaacttcctgtcccttccggcaggcagccgggaaaaacggcgcatcaaatgattccatcccagcccccggcatcagggatgaacgggacaaggccggaaaatgtctcactcccgtgcggttccggctcccatacccggccgcttcagagataacgtttttcacctttatgaatgcacaggacgaactcaagatcagggacatggaaatcctgttccagccttttcactcacgcaagctcagcactcccacccgtatcgtccttccggccatgacccggggattttctcccaacggggttcccacggaccaggtagccgcttattataaaaggcgggccgggcatgaagtagggctcatcatcacggagggcactttcattgacgagcccagcgcctcgccttcctccaactatcccaatttcttcgggggcgcttccctgcggggatggaaaaaggtgctggaagccgtccacaccacggattgcaaaatagccccgcaactctggcatgtgggcatggcccggcccttcaagggagaagacctgcccaatccggagctgccgcccatcgggccttccggaattgacgtaaacacgctggaacagacggcggaaccgatgagcatcgctaaaattgaggaggttatcaatgcttttgcgagggcggctgcggacgccaagcggctgggttttgacggtgtggaactgcatggagcgcacggctacctgattgaccagtttttctggaaggagaccaacaggcgcacggacgaatacggaggcgacctgacaggccggacccgttttgccagccgcatcatccatgccgtccgcaaggcagtgggcagccggttccccatcatcttccgcttctcccaatggaaaacgggccattatgacgccaagctggcgtatacccccatggaactggaagcttttctggctccgctgacggatgcgggcgtggatatctttgactgttccacacgccggttttgggaaccggagtttgaaggttcccgcctcaacctagccgggtggaccaggaaacttaccggaaaacccacgatttccgtcggctccgtggggcttaagggagattttacgaatgcctttgacggagggccggaagcggagaccgccagtgtggaacctctggtggaacggctgaaagcaggggaatttgacctgattgccgtaggccgcgccctgctggcggatgcggaatgggcggaaaaaatacgccatgcgcgggaaaaagatatccacctgtttacgaaggaagacctgaaaacgctgaaataacggatttgcctgactggaaggatgatgggggaactccactccgcaaagccgggaggtagaaaaacgccaggccgccccaaaacggaggggccggatttttaccccatttccgcagcaatcatcgttcccgcagaggaggttcttttatttcttcctgacgcggacagtcaggtacaacagccgcagaagaaccagggccggaatctgaagcgtcagcaaataccacggagcggaaccgaaatattccagcacggttccagccggagcataccgggtaaaaccgtaattcgtatccagccagatattcaccggaataatcaaaaccaggtaggcgtcacacaaacccagcgcccgcatgtcgtcccacggccgcgcgcgccattgcaggacggcgggaaggtaaagggcggaaatcaataaaagcccgtgcccgacgaaaaaggcgaaaaaggcggcggagggaaaaccgtcgtgaagcatgggtgtaatcagtccctggacgctcgccgtcagcacgccgaaatacgccacggcgcatgcccagggcgtacggaaccacagggcaataaaacagaccagagccatcagactgcaaaaatgcagcggaagcctgtcctgccagggctcccaatgttctctgacgatgcggccgaatgtttccatcagaaacgtcagcaggaaaacccctcccagaatctttcccacaagcaaacggctctccatccggagccgccggcatccccacaggagcccccctgcggccagagccacgatgcccagggcagcccagtgcggcaggctccaacggacaaacaggggtgccatttctccggtcataaaaaatccatcaacgagaaggaggaggttccgggcacgcatgaagtttggcgctgatagcctccaccttaagacacagaacacatacggaatggaccatgccgggagtaaaatccgcatccctgcccgtctggtgcagcatgatgcggcgcaaggcatgcatcttttcctcatcctcccggagaaattcgacgacgccacgccccatgacgcagccgtaggcgtaactgtaccggcacggggcatccccctccagcaacacatgatccccatccatttcaaaagaaacctccggacggttttgcaggatatccagcttcctcccttccctggcacagtggaaaaacaggctcagggaaccatttttttcttcatatccgaagttgaggggaactacatacacctccctgccgtcccacagtcccaggcggcacaccttgaaccgggcgaccatttccatcaaatccccgtgccgggtcacctccctgtcttttcttctcataagccggcgccttccatccattcactcatgcaaagggcggcacgtccggccagcagggagccattccgtacggaagccgcccgaagtccgcaaatatccgttcccgcctgcatcaattcacaggcatggccggtcagccactcctccatccgggaaacatccgcctccacatggaactggaaagccagggcatgcctccctacgcaaaaagcctgatggggagtcacctccgtggatgccagcaggcgcgctccggaagggacatcgaacgtatccccgtgccaatgcaggacgggtaccccctccagataacgaagtggtgacaaacgcccatccaccgtcagggatacggttccccaccctatttccttggcctttccgggataaacgcggctgccgagggcatgggccatcatttgagctccgaggcatacgcccagcaaaggctgccgactttccagacgcatgcggaccaaatccagttccgtcttcaaatagggatacgattccgtatcccccacccctacgggaccgcccagcaccacgcacaaatcagcctccagccattcccggacggaaggacagggagcgcccgcccggatgtaccgtattcggaagcccctgtccctgaaaaggggttccagcgtacccagatcttcaaaagccacatggcgcagggccaagcaggtgcgggaggcagaacggctactcatggcgacggaggatgaacttcaacaagaaatatagaaaaaaatcctccgggaaaagctttttgccctcttccctccgcatttccgaaaccaggatatccatcatgaaacgggaatatccgccacatccgcaaaaaaaccctccgccgcacggcataaatccacaggattcaattcaatctggcaccccagacgtccgccgctcaccaccatttccggcagggcttccgcgctggcatcaactacagtagggtatttccttttcatccccaaagccgtgcagccgccgcgcacgtaccccgtcacggcggtaatatccttcaccggaagcatggaaagagccttttctcccacggtgcgggcagcctttttcaaggaaagctccgcgcctatgggtatcacgaacacgtaatactgccgcggagctccctccgttaccagtgtcttgtacatcttctcctccgccaggttcaatgcttccgccgtatgccgcgcatccacaaactcgcggcattcataggaataatgcctgtacgggatatgcagagcatccagcaggcgcatggcatttgtctttgcctccttctttttggacataaacttgaaaagggaacgtcccggtaacataggaaaaaagccttcctttgacaaggccgagccccccaacggacccatgaaaaattggaatggaaacggagatttctctgaaaaagcggtaaggccagtaacaccgtttccccaggacaacccgttcacagcggagaatttcagaaacagcggacggagaaaaagaaaaaggaaaaggaaaaaacgcctcatttcctcacaacccttgacttgccgctggcagaaaagataacatccggtatcatggaagattatcatgtccggagaagccttggagaacatgtcctgcgatgcttcgtcctgattgttgcgctcttcatcatgtctctgggcatcgctctgtccaccaaggcagacctgggagtctcccccatctcctgcacgccctatgtgctcagcctggcattccctctaaccatggggaccgtcaccatcctcatgcacctgagctttgtggccgtgcaggcggccctgctgaaaaggcaattccgtccggcgcatctgctccagattcccatagcttttatcttcggctttctgacggatttttccatgtggctcatggcgcctctggaaccggacggatacctgtggtccgttattctctgcctgttcagctgcgtggtaatcggattcggcgtctttcttcaggttaaggcggattccgttcttctggcgggggaaggcatgagcctggccttcgtcaaactcttcaaatgggaattcggagccgtaaaaaccgggatggactgcacgctcgtctgcatcggcctggcctgttccctcatcttcctgcctggactgacaggcatacgggaaggaaccgtggtggccgccgtcctggtgggaatgatcgtccgttttttcaacaggcacgtcttctggccggacaggctcctggaacggatggcgcgccccggagcagcaagtgagcttcctccgctgacgcaaacgtccgcttatgctccggacgcccctctggtcatttccattgaccgggaatacggttccggcggccatgccatcgggaaaatgctggcggaaaagctgggcatccgattctacgactcggaactggtgtccctcacggcctcccggagcggcctcactccagactacatccgcaagcacgaacaatagctttccagccgcttcctgcatgaactctacgcccagaactacgcctacacagcggaggaactgcctccggaagacgccgccttcctggcccagagcaaagttatccgggacattacggccggtcaggcgtgcgtcattgtgggccgctgcgccaacttcatcctaaaagggaggcccaacctgttcagtgttttccttcatgcggacaggaacacgcgcatgcagcgcgttattgaaaactacggggtaaaacctggcggcgcagcccgagccatggatatcatggacgcccgccgccgcacccactgcctgcactacaccgggcaggaactgggcaatgcacgcctctacaacttgtgcgtcaacacgtccgactatggcctggagcgcacggtggaactgattctggaagccatcaacaccagaaccgaacaatcttcctctgtagaaacggttcccgtccgctccgcatcttttcccgaaccggaggccggcagcattcccggagaaatatccctggcctgaccggggcaaatgtctcaaacaggcaatacttatgtaaaaactgcctgatcggtaaataagaaacccggcaggaaagcagatggctccttccctataaaagcagccccatccctccaaacttccccggcttttttccggctgcgcaattcaaagcaacaagatacggcctttctgagtccaaaaagcatgagactctggtcactccacccctcttacctggatgctgtcggcctggttgccctgtggagagaaggcctcctggcacgcaaagttttgcaggggcagacaaaaggctatatccatcatccccagctcttccgcttccgggagacgggaacccccattcatgtcctggatttctacctgaaaaccgtccatgacgaatccatccgcagaggctaccattttgatttaagcaaaatttctccctgtgaagtccggcctccttcccttctacttccggagaaacagctcgaatacgaattctttcatcttctggacaagctcaaggaaaggtccccgcggcaatattccctgttgcggcaaacggccgttatccttccccatccgctttttcaaataaaaccaggagatatttgctcctgggagaaaaagcctgttccgtcattaacatgacttcattcccttttccggaaactattgatctttttaatagtgacggcgatcaaaccacagacatacgccattcccatctcatcacccggcaattactgcagcgaacagaattactgtaaacctttccaaccttttgctttttcaggctcatacagtgaaaaaacatgtccggcaaaggaaaaggccttaaagcgttaaccgctttaaggcctttatttggtggagcatagcgggttcgaaccgctgacctcttcaatgccattgaagcgctctaccaactgagctaatacccctttgactttcgtcttggtgcgtcctgttgaagacgggggaaatctatcatttccaaagcgggcatgcaagctttttctacaaaaaaattgttccgggatgatttttccggaaaatactgaatctgggaaggggtgcaaatcccatgcagacgaaaacagggacagtctgaacaaatgtgtttgaataagactcattcctgttttaccattccataaatgatgaaacgccctctttttactcatcgcatgatattcgcctgcgctctggcaattttgtttctggccggttccgttcatgcccaggagacttctgctgcagaaaggccgccggcccagacggaggacagcggcatctccacaccccgcagagtcgccggactgggcgttctggcgttcctgatcggctggatgatttggagaagcagttccagccgccaaaaggacagaggccatgaacaggagaatccccggtaatgacgccgtttttgaaaggttgccctgcttcctggcgtagtcgttgcaggaaagtgtctccggccatgaacatgattctacccatcctgagctttctgtgcggcgtcatgctgacggaagcggcttccggctcttccggggagggaaagccttctcccggcgtagttcaggaattatggttcggcattccgggagcatccgtaaaggatttgacccacaggaagatttttgaaacggcggccccggatatccgcacgatcagcaatctggatgtggaaaaccagggggacaggtacggggcccgttacacagcccttctgaaagtcccggcaagcgggaagtaccgcctttacctgtcttccgatgattccgcagaattatggctgggcaaggatgctacccagaaggacatgacctgcatcgccaccgtcaaaggatattccgacatccataattggggcaatcagcccaaccaggcttccgaacctatccaactggaggcggaccggttttatttccttcaggtgattcacaaggaggatggaggcccggaccacatgtccgtagcctggtccggtccgggcatcccctctcccgtcatcatccctgccacggcgctgttcataccgcccggtatcctgccggaagaaaaaaagcaatccccggccaaagcggactgaaaagccctttgattaccttccctccggcccttccctgctttcaggagatagtatctatttgccgatgagaaaatgaatatttttcatcaaactctatccatcaattatttccaatacgaaaaaaccggacctccccccctatgggagaagtccggtcttttctcgtcgtttatcatgtagttaattgaagcggcctgacacagaaaaatgccaaaacaccttctgaatccaaatctaacggattttagaatccgcagtcaagttcctaccttgaaaggaaaagatttgagaaaaatcccgatgttcttcgaggatattcatcttggatacaaaaaactctcagcttttcatgtgaaggataaaatttcaagagaatgaagaaggcatttttgttattcatatcttttttaaatccaagaatcatttattttcaataatctatctttcttgccgtccataaggaacggacattgccgttcagaaaaaatgcttctcccctcctgaaattttttatcattaatgaaactgcggattctaaaatccgtgttacgaggagaatacctgaatgagtgatttcgaataaaacgccacctgtcccaaagagccaagagataagcgttttcacgtgaaaagagccgcacgacaactccttttttcagaagaaagcaagtttgaaatcatttttcagtacgattaaaaaataagaaatgatgtagaatagtcctgccgcgagattctcaaaagattccatctgttgatattcagcaaattcattctataaaaaacatagaaaatcaataaaatattctgaaagaaaggggggatatattcagtatctcataaccctctgaccgtataaatgatgttgaatatacggaaaaaatacgggaacgcgggaaagtttcaacagacggaagaagcagcgattttaatagacctgggttgctggacaaaagcagatgcgtttgccacctttccagatgttgccgaggaaggtaaaaacaatcagacattaatgtctgcggcgccttgccagaaggcctcccagtcccaggaacgccagagaggatatcgccggttccggaatctggctgatggaaagggaaccgatgggtcatggaacagccgttgccggatgtgctgggcccagcctcccaaggtgagaccgttcaagtagagaactgacttttcatagttgatttccgttttgttgactaatgccgtgtctccaaggaatgcctccacataggtagagccgttttccgccaggaaattgacggtgagcatgccggaatagatgtcggaaacggagccgcttttcccggaaacattcatgttatttccattattggaaaaagcccaggtattggtggtggtagaaaaaccgaaggccgtcgtttgcgtgttgtatgctccaaagcccaaagagaacacggggccatttccaagctggaggccggacttcatttctgaggggatttttattcatcaagtgtagctaagaacgcctgccaacaaatcattttactggaaaagtacactttcatcccctgctccgctatccggcatgaatgattatcattttattcacacctcttccctcttttttcaggacccgcattcttttttctcaggaaaaacatgaaacaggaaagaccgcatggaaagggaagaaaacagagaacgctccttatgccatcgaaaaatccagaacgaaacatacgatttttcacaggcgttttttactttccgtaaatcatccccatgtcttttccacccccttgaaaccatttccccggaacggaacgaggaaaacgtgacgacaattgtccttgttccaatgacgggcgggcggtagattttccgcgccatatgagcagatcatccagaacagaacgccttgattacctgaaagaccagttacgtaaaagggttgtcatcctggatggcgccatgggcaccaatatccaaaaattcagactggaagagaaggattaccgcggagaacgtttcgcggacgcggcacgctatcccaacgatttaaagaataataacgaccttctggttctgaccaggccggatattattctggatattcaccgccgctttctggacacgggacgggcggatattctggaaacctgcacattcggagccaccaacatcggccagcatgattatttctggcgccgtccggaagaaggcagacacaagaaccagcagtatttccaagaggtggtggacgcccctgaactgaaagcccttgtccgggaattgaacctgtctgctgccgcgctcgcccggcaggcgtgcgacgaagcggaagccgcagacggcaaaccccgtctggtggccggctccatcggtcccatgcccgtcacctgttccctgtctcccgatgtgaatgatcccggcttccgcgccgtgaatttccgccagctcaggcaggcgtaccgggatcaggcgctggctttgctggaagggggagtggacatgctgctggtggagacgattttcgacacgctgaacgccaaggctgccctgttcgccattgaagaaatttttgaggaacaaccggaaagctctgttccggtcatggtgtccgtcacgctgacggacaaagccggacgcacgctgtccggccagaccattgaagcattctggaactccatccgccacgtgcgccccttctccgtaggcattaattgcgccctggggccggacctgatgcgcccctttgcggaagaactgtccggactggcggattgccacatgtccgtttacgcgaatgccgggcttcccaacccgctcagccctaccggctacgaccttctgccggcggatatggcccggttcatgaaggaatatgcggaccatggcctgctgaacatcgtgggcggctgctgcggaaccaccccggagcacatcggcaccattgcggctgccgtggaaggaatgcctccgcgcgttccggctccccaaacgcctgcgcttcgcctgtccggatatgaagcgtataaccacacgcgggaaaaaaacaccctctttgtcggggaacgctgcaacgtggcgggctctcccaaattcgcccgcctgattcgtgaaggaaactacgaggaagcggtatccattgcccggcagcaggtggaaaatggcgcgctagtattggatttctgttttgacgacggcctgatcgacgggcagcaggccatggtccgcttcctgaaccttgtttccgcagagccggatatcgcccgcgttcctttcatggtggattcctccaaatgggaagtgctggaagcggggctccaatgcatgcagggcaagggaatcgtgaattccatctccctgaaggagggggaagaagaattcctgaagaaagcggcgctgattaagaagtacggcgcggcggtcgtggtcatggcgtttgacgaacagggacaggccgccaattacgaggaccgcgtccgcatctccagacgagcctatgacttgctggtaaaccgggtgcagtttcctccggaagacatcatttttgacccgaacgtcctgaccgtaggcaccggcattgcggaacacgccgattacgctcttgatttcttcaaggccgcaggctggatttcccggaacctgccgcatgcccacatttccggcggcatttccaatgtctcctttgccttccgcggcaacaacccggtgcgggaagccatgcattccgctttcctgtaccatgctacgcagcaggggctggacatgtgcatcgtgaacgccgggatgctggaggtgtacgacaatattcccaaggacaggctggagctgattgaagacgttctgctgaaccggaggacggacgccacggaacgcctgacggactacgcggaaaaactggcagcggaaaaaaccggagacggaaaggagaaaaaaaccgtactggcctggagggaacaggatgtctccaaacgcctggaatattctcttatcaagggcattaccgaatttgttgacgcggatacggaggaggcttttctggagcagggttccccgctgaacgtgattgaaggccctctgatggccggcatgaaggttgtgggacaactgtttggggacggcaaaatgttcctgccgcaggtggtgaaaagcgcccgcgtcatgaaacaggctgtagcctggctcaccccctatatagaagcggacagcaaaggtgccgccaaggcgggaaaagccgtgatcgccaccgtgaagggggacgtgcatgacatcggcaaaaatatcgtcggcgtggtgttgggctgcaacggttttgaaatgattgacctgggcgtcatggtgcattgcgataccattctggaccgggcggaagcggaacaggcggatctggtgatgctttccgggctgatcaccccttccctggaagagatgtcccatgtagccgcggaaatggaacgccgggggatgaccattcccctgatggtggggggagctacgacgtcagccctgcacacggccctgaaaatagccccccattatcaaggagccgtggtgcatacggaggatgcctcccaggtggtgcccgcagcagcctccctggtgggagaaaaaaaggattcctacattgccgccgtgaaagcccggcaggaggaattgcgcaacaatcatgaaaacaaactagtccgcgacctcctgcctctggagaaagccagggaattgcggtggaagggggcggaaggcggctatctccctcccattcccgcccgtctgggcccggtttccatcggcagcctgcacagctctataagttgcggctgctgcagtgacgatccgcgttattacgtaactgttcaggagcttatcgagcgcatggactggacgccttttttccacgcctgggagctgcacggcacatgggaccgcgtccgccgggagttccgcaccaaggacccgtccaaggctgaggcggccgcggctctgcatcaggacgccctccgcctgctggaacaggccgtgaaggaaaaccgctaccaggcgcgcggcgtcataggcattttcccagccaattcaacggccagccatgacgacatcaccgtctgggcggatgaatccagaaccattcccctggctacgctgctgacgcagcgccagcaactggacaaacaggggaaaccccggctggcgctggcggacttcatcgctcccgaaggcgtcagggattacgtaggggccatggcggtcagcatccacggctcccgccgctgggcaaaggaatgggaagccagaaacgactcctaccgcgccctgctggtcagctctctggcggaccgcctggtggaggctttcgcggccatcgcccatgataagctgcgccttttgtggaatattccggaagggtccggcgtgcgtcccgcctgcgggtaccccagccagccggaccaccaggaaaaggaaaccgtcttcaccctgctccacgcccgggaggaagcgggcatgagcctgacggaaacatggatgatgcagcccgtttcttccgtctgcgccctcgtcttctcccatccggaaagcacttatttctccgtgggcgtcaccggggaagaccagcaggaggattacgcctccagaaagcgggcctcccggccctgacctcccctttccctttgatgcagcataccgaccagatacaggccctttcggaattcctgctggaatacgccaccaccctcatgggcgcgggagtgcataccaaccgcgccgtgcgcaatatttcccgcattgctgccgcgtatggatacagcgcggacatgaccattttccagcgcaatatcaccatgagcctgatctgcaaggatgacgagacgctgcgccgcacctccgtccggaaactgaaacctctggcgttcaacctgaacctgatccagcagctcagtgaattgagctggctcccggtggacaacaacgtcagcattgcggaaatggaacaggcattccgctccatggtgcgcaccaaaagattttcccgctggacggacctgctcctggtcagcgtgggcaacgccgccttctgccgcctgtttaacggagacctgtgggccatgctgaccgtgttcgccgccaccatgctgggctttctggccaagcagcagcttacccggctgaaatacaatccgctgggggtcatcatcctttccgccttcaccgcttccatggcggccgcgtgcgccgtccttttccagataggctccacaccgcagatcgccctggcaaccagcgtcctgttcctggtgcccggcgtccagatgatcaactccattatggacctgatgcacggccacatcctgatgggcatttcccgcggcgtccactctatcatgatgatcgtctgcatcgccatcggcctttccgcaaccatgctcatcgtcggggtaaacagcttatgaatccagattttatttcatccatccttctggacggactgatggccgccatcgccgccacgggatttgcggtcatctccaatccgcccaagcgcgccattgccgtttccgccgttctggcggccgtcggccacgctttccgcttttacatgcagcattcctggaccattgacatttccagcgccaccttcattgccgccttcaccataggcatgctgggcgtcatgacggccaagctggtaaaatgcccggcggaaatatttgctttcccttccctgcttcccatgattcccggcgtgtacgcctataagaccatcctagccctgatgcagttcatgcaggagaaccaggacgcggccgtcatgaaccggctgatcgtggacatctgcaaaaacggcatcaccgccttcttcatcatcttttccctggtcatcggcgtagccatacccatgctgatgttcaaacggttgagctatacacgcgtcatcaagccggggcattgaccttcaaacaagggagacagggcatttttctcttgccagactgcgccccgtgtggtttactacgccccgcaacggcagaaacgcctgagcagacagccccatagtgtaattggtaacacacctgattttggttcagtatttctaggttcgagtcctggtggggctgccaatccaaccctccttcaaggaggattttttgttgccttttttcaggattcatcctctcccggagcgcacttgaacgccatttcccatcatctgcgcaaaattcttgaaaatccaacagccgtactgccgcgcatgaagcatgcggaagtgaaggagaaggctggaaagagaggtactccatgaacggctcgcatacggcattccgggacggtaaaagctcttgcgttacagggatttttttgcataatcccccggcaggaatgacggaaaaacctatacaactggggcttgccgggctgggaacggtcggttccggcgtttatgaaacgctgtgccgcaatcacgccctgctggaagcccggagcaagattcctttcaggctcaagcgcatcgccgtgcgcaacctggaaaagcccagggaaaccgtcgttccccgggaactgctgacggacgattggcaggatttggtcaatgacccggaaatagacatcattattgagctgattggagggacgcgccaggcttacgacctggtgacgctggccctccgtgccggcaagcccgtcgttacggggaacaaggctcttctggccgagtacggagcggagattttcaagctttccgcggaaatgggcacccccatttatttcgaagcgtccgccggcggcggcatccccattatccagagcttgcagaattccctgatttgcaaccacatcaattccattgtgggaattatcaacggaacgtccaactatattctctccgccatgggggaacacggggccgattacgcggacgccctggcccaggcccagaagctgggcttcgcggaagaagacccctccctggacgtcaacggctgggacgccgcccataaggcgctcatcctggcgatgctggcctacggaacaaccatttccccggataaaatttacgtcagaggcattgagaatatcaccagccgggatttcgaatttgccaaaaaactgggctataccatcaagctccttgtcgtcatccgctaccatgaggggcaggaagacgctctggaactgcgtgtccagccctgttttgtccatgactggcatatcctggcttccgtgaacggcgtgttcaacgccatttccgtcaacggggacattgtgggggaaacgctgttttacggccgcggagcgggcaagaaccccaccgcttccgccgtcatcagcgacatcatcaccgccatgcgcgaaagccgctatccggaataccatacgggcttcaatccctatgccaaggcctgcgggatcatgcacattaatgatacggtcactccgtattacgtccgcttccaggtggtggaccagccgggcgtcattgcggaaatagcccgcattctggccaccttcggcatcggcatttccgccacctcttccctccccagccatattgatgagggcggagccccctggaacgacctcgttttcatcctccattcctgcccgtggggccagctccagaaagctctggaggaaataacccgcatctcctgcgtggcggcggaaccccgcgtcctgcgcatagaacatcttcttcctcaatcctaacctacatatcatcctgttacatggctcttatcgttcaaaaattcgggggcagctccgtcggcaccattgaccgcatccgcaatgtagcgcgccgcatccatgaaaccgccagggaaggcaaccaggtggtcgccgtcgtttccgccatgagcggcgtgacggacaagctgatcgggcttgccagggaattatctgaaaccccttgcgaacgcgaacttgacgtgctgatggccaccggcgaacagcagtccatcgccctgctctgcatggctctgcatgaactgggggaaaaagccgtgtccttcacgggggcgcaggccgggatcaccaccttcggcagccacacgcgggggcgcatccacaacattgacccaacgctgatgaacaagtacctgctggaaggcaacatcctgatctgcgccggcttccagggggttacggaagaaggaatggtccagacgctgggccgcggcggttccgatctctccgccatcgccatcgcggccgccctgaaagcggacgtgtgccagattttcacagatgtggacggcgtctatacctgcgacccccgcgtggtcaaggacgccaagaaaatacaaaccctttcatatgacgaaatgctggaaatggcttccaacgggtccaaggtgatgcagtcgcgttccgtggaattcgccaaaaaattcggtgtcgtctttgaagttcgcaactccatgaacaacaaccccggtacaatcgtgcaagaagaaaccccctccatggaagccgtcgtcatccgcggcatttccattgaccgcaaccaggcccgcgtcaccattaccggcattccggaccaaatcggctacacggcccagatactgggcgctctggcagaagcggaaatcaacctggatatgattctggccaatactgctcatgacggctatgtccgccagtcctttacaatgccctccaacgaactgggccgcgcccaggccgccctcaaaccggttatggccgccctcggctccaccgtcaaggtggaaacggaagcgggactggccaagctttccctggtcggcatcggcatgcgttcccattcaggcgtgggagccaccgctttcaaggccctggcggacgccaatatcaagatcggcatgatttccacctcggaaatcaagattgccgtgatggtggacgaatccgatattgaggaagcggcccgggtagtgcataaggcgttcaacctgggagcctgattttttcagtatttatcaactcttttttccgcgccggttcacgttcccgtgaaccgactttttcatgcggcaagaaaagcagccccttcccggaagaggaacgccatccccccgtttccttccaattcccgaatgaaggaagggcgtctctctccgcatgctgttgcgggcggaatggccgtcacaggaacacaggaggaatgacgccccctttccctgttccggttttaccggcttgccgcccaggtttttcagcgttcacataaaatccatgcctccaggaacggaattctccgggggaaagggaagtcctttcaggtacggagcaaaaaagcacaacaaacagaaggttcatctacaggggatcaaccgtcctccgcaccgcgcagaggctgccgcagccaatcccttctattgcacccgtatcgtctgctcaatcagttcgttcaggcgcggcgcagtaatgccgccaaccatatccttcagcttcatcccttccagatacagaaccgtcagagggacggcttccaggccatatttgcgagctatgtccggataggcgtccgcatctatcagcacggcaaacgccttgccgtcctgcgattcggcataagattttaccgcctggacgtaatccatggccgggcggctccacgaagcgtaaaaaacaagaagcaccttgcggccggaaagttccgtaagctgccgcatgtcctctcccttgtaatccatccatacgggggcctttttcttgggttttgcgggcgggaggacttttttgggagggtcaaacgtcctttccagagggcgcggagcgggctttttttccgcataacgggcgcgacgttcactggaatcgtcgcacccggtcagtccggccgccagcaaaccgcagaccaatatgaacaagccctgtttcatccgcaggcaagtatgcccggagaaggcgaatttgcaagcctgaaacccatcccgcttttcgcattgcccctcccccctctttctgttatggtgaaggttgcatgaatggcgtccctccactggaattcgcaggtgtttcccactgggctgccctggccgcactcctggcggcgggagcctgcatcctggagctggggcagtcctacaagaaaaccgtcagaaaccgcactaccttctggctgggggcggtctgcctgttcagcctggttcccgacctggccgccatgctggccgatgaaccggaaaagaactggacatggatgctccccctgcatttctgctccgtcatgcaggtggtgtgcgccctgagcctgtggataccctcccgtcggctgcgctccgtggcctattactgcgtgctgtgcgccaccctccaggggctggtgactccttccgtggcccatgatttcccctcatggacgtattttgcctttttcctgtcccacggcgtgacagtcatcacggcgctttacctgcctctggctctggaatggaagccggcgcgctgggatttcctgtgggcttttttgctggcgaatgcgtacctggtggccattcatcccgtcaacatgcttctgggaaccaattacgggtttaccgtggccactcccgccggagggtccgtgctggactttctcgggccatggccctggtacctgctgtggatgcaggttccggcgctggcgctgatgtatctgctcacgctccccttccgccgttatcccaagggccgcacgggcagttccctgttccgccattgaaagggaatctttcttccctgccccgccgcttccgacggaatccccgcaaaacggcccgcccgtttccggaaaaaaagagccccggaaagttctttattgtataatcggcttgaggatgccgatgtaggtgtccgatgtccctgttccgcgataaatggaattaatcctgattttgatggtgtgcacaggctgcctgtaatacggaggcacgacgatctgcggagtccagtcatcccgcagcgtggcgtcaaaagtataagttccgttcagcgtcacctgaatgcctttggggcggctgaacatggagtaggcaatattcgggtgcctccgggcttccgaatccttttccgggtcggtcaccggggaaatgccggtctccagcatgattcccagcagccggccgggtttcctgagcttgatttccagggtttccccctggccgtccccggaaacgctttccgcccaatagccggaactttttttcaggttgtccggtgaacatggagccccgtaagggtccctgtccagtgtggagctggccgttacatcgtactggtccgtcaaaacgcctttttctccgcggacggtaatccgcccatccttgtccagcacccaaccggggcccggagtaagcaccaaggagggagcgtaaggcctgccgtccgctcccagcagagaccaggtataaacgcctttgggcgtcgtcacaatggatttggcatccgcagagggatccagcttgacggactggttggtcatctccgagctgtacacattgaccaccgccctgggggtgccccccgtccaggtcattaccggagaggtaagcagcgtcaggcgcggttcccccatgtagaccttcggttccggcgtaatggcaacgtcctgcgtataaggaacggagaactggaaggcaagaacatggattcccgccttgttgggaacctgggccaccagccagtgagttatgccggcaatgggaaacatggagggagcgtccgcctgtagatgccgcccctccaccagggaaaaatcacattttagatcatccacggatgtgacgacgtcctgcaccgctttcgtaaaagggaggctgcgtatgggttcctgcctggcggcattggcctgttcatcaggcggttcgtactggaacggcacgcctacggaaatggttttccccctgattcccctggggatatccagcgcgcaggtgtaaatcaggaaagcctggtgctgcttcagggaaacagtaacgtcaagcgcgttcagccggattccgtccgcctgcgtcaaatccatgggaacgggcaagccgggaaccggagcgatgctttgaaaggatatctcctgctggcgggggcgatccgctttttccgcggcggtctgttccttctgctggggttcggcggccatgcccggcacgcagcatgcaatgccggccagccagatcagggtagccaatctcatggccgttagattaacgcgctgcagcccgttcatcaagtccatttaggggaggggggaaaggcctcttccgtacccgctcttttccctgaacaaacaggggcggccctcctttgaaccagcgacgcccgcagcaggaaaatattcgttccaaactccggaattggtcgcttcatgcccttggaaacgggctccgggattccgcctggacgtctttccgcttctccggcagaaagatgacatatgacaggtaaaaacaaactgaggggcatcggagggctttttccgccacaaaccagcatcatttactcattagcaacaatcggcatccattgttgcatatttgcagaaagactgtgttcttccgctttcccggcgccgttaatgtactcttattaccagggtttttcatgaaaagcccgtttccgggggagagccaaaacgcccagccgcccccccttcgctaaacaaaaaaagaagcatgcggaagacagaaaaaatcacgcaagacaggagaaatttttctagaaaacatgacaaacaacacaatatatagcgtatataaaaaaatactgtacaatatttccttttcatcaggattatttttcagtagataatgcacacgctacgcgccgccgccccacgacgaagcgcaagccttacgggattgttcccaaatctttctacttcgcaagccaatgaccacagacaactcgcaaaccatactcaaactgcgcacaggccaggaaattatcctcccccagaggaaagacctgctgggcggattgaaattcaccagaagattttcacacaatgaagtccacccctatgatgaagtggactggacgcgccgcgacgtccgcattatggattggaaaaccggcaagaccatttacgagcgtctgggtctggaagctcccgcccactgggatgacaacgccgtcaaaatcacggcggacaaataccttttcggcagcgaacccggctccctggaatatgaagacagcttccgcaatatttacgaccgcatttccaatacctataccgtatggggatgggaagaaggttacttcgccacactggaagacgcggaaattttcaatgaggaaatcaaggccatgctggtacagcagatatgggcgcccaattcccccgtctggttcaacatcggccactgggagcagtggcgctggggacgcccggacctgagggaaagctatacaggccacggcaacaaggcctaccataccaaggggaccaagaacaatctgaaaaccttcacggtccagtccacgtatgaatatccccagtgttccgcctgtttcctgacggaagtgggagacagcatggaggatattctggaccacctgacgacggaaggccgtattttcgcgtccggttccggcgtgggcatcaacctgtccaccctccggtcctccaaggagcccatcagcggcaagggccggtcctccggccccatctccttcgaccgcggctgggaccgcatggccggcgccatcaaatccggaggcaagacgcgccgcgccgcacgcatggtcctgatgttcagcgaccatccggatattttcgaattcatcaatacgaagaaccgccaggaagacatcgccaaggttatcctgcgcgaacacaacgtgcacgtggagctcaagcagattgcggagaccaagctggttgccggcactccggcggaaaaggccgccgcccgcgtcattctttccctgcccctggccacccggaacagttttgacccgcacatggatgccctgctgtacggggaaacgctctcccaccagaacgcgaaccattccgtttccctgaagggggatttctggcaggcgctcgccaataacggcaatacctacacgcgctgggtcacgaatccggcccacatcgaacagacattccgcgcccaggaacttctggaagccatggcccagtccatctgggacaacggggaacccggcgtgcacaataacgacgtaatcaacctgtggaaccccgtcaagtccatcggcaccatcactacgtccaatccctgctcggaatacgtcttcctgaacaatacgagctgcaacctttcctccttcaacgcctaccgcttcctgatcaagggagaggacggcaagcccgtttttgatgcggacgccctgacccacgccgcccgcctggccatggtctgcgcggacctgaatgtggaacgcggcggcttcccgattgaagaaatcgcggagggcacctacaagtaccgcacgacaggcatcggcttcgccaacgtgggcggctctctgatggccctgggcgtgccttacgattccgacgaaggccgctggattgcctcccagctttgcagcgccctgacggcggcctgctggacggcctccgcggaaatgggcgcggaactgggctcctacgtggaataccccgccagcaagaaagacctgctcgccgtgctgcgcctgcacaacgcagcccagaaactggcaagcgccctgccctcccagaaggattccaagacgctggacgacctgattgagaacatcatcgccaatgccggagggatcctgccggaagcgcaggggctcaccgcctcctatgccctgcatgcctacctcaagagcttcaaggcccccaccatgatgaacagggagcgcatcgcccccgcggccaaactggcggaagccgcttccgacatgtgggcgaaggtgatcaaggccacagcgcaccgcaacgcgtttgtttccgtaatggcccccacgggcaccatttccgccccgcttggctgctatgatgaaggcaccacttccattgaaccggactacacgctggtgaaatggaagcagctggcgggcggaggctccctgaagatgttcaaccgcctggccctggaaggcctccgctccctgggttatccggaagacttcgtcaatgaagccgctctggaagtggcgggcctggacggcctgatttccgcgttccaggggaatatggattacgtcgtgaaccagctcattgtggacccctgcaatgaccaggccggccccgtgcgcctcgcgtggcgccgcctgctctccggcacggaatcccgcagtgaaattcaggaaaaagtggcttatatcagcaacccggccaacatggccgtgctgacggcggatgaactcgccgtagtcaacggagccgcccatattgaatccataccgtggctgaataaaaaggacctgccggtctttgactgcgccgccaccaacggcaacggcatccgtgccatttcccccgccggccatgtgctgatgctgggcgccctccagcccttcatctccggcgcgtgctccaagacggtcaacatgcccgtctccgccagcgtgcaggatatttacgattccctcatcatgtcccacgagctgggcgtgaagtgcatcgccatcttccgcgccggctccaaggcgaatgccgtttacgtggtggataccccggaaacgcgcatgttcaaggccaaccacgtctgggaacagctggtgaatgccggatcggacgccattgacgaaatcatcgcggaggcatccaagccgcgccagcgcaagctgcccggccgccgtctgggccagaccgtaaaattctccgtaggcggccagctgacgggctacctgacggtaggcgtctatgcggacggcacctgcggggaagttttcggacgcctgggacaagtcggctccttcgcctccggcatgtttgaagcttactgcaagctcctctccaccgcccttcagttcggcgtgcctctcaaggaagtggtcaagggtttccgcaattactccttcgagccctccgggttctgccgcgtgggggacgacacggaggcggacacctgcacggaaatccgctcctgcgcttccgtggtggatttgattgccaagattctggcgtggcttttcccggaaagcaacggctaccgcctgcgggacgtcttctccatccccagcgtcagccttccgggccaggctccggatacgacggtaagcgtgctgcccccccgcatcatcaccgctccggcgcatcccgctactccggccctgccggaaattcccgccggaaaggttccggaaggaacaatgctcaacggagcctccctctgcccgcagtgccactccctggcctatgtccaggacggcaaatgcaaatcctgccgctcctgcggatacaaggacggcggctgcggggaataaacggtaaccagatcattccagccccgctctttccgggcggaatccggctgttgccgggttccgcctggtgaatttacggagaaggcattctttccgggaaagacggttttccggccctcccggcccccgccccgcatgaactttccggaaagaagcgaacagaaaccgccgcgcggggaaaaggaatgataggcgtttgccttgaaatccggcagcatttcattcatagtccggagcgtacgcctgaagccgttcccacattttccatgaaaccctactataccctggccgatcttctggatgaagaacatccgtttgacgccggggaaaccgttcccgccagactggccgtaatcggttttcccattgcccattccaaatcccccgccatgcagcaggccgcgctggacgcggcgggcattcgcgcccgttatatccgtatacaggcttctccggaagaattcggggaggtggtgcggctcctcagaaaaaggggattcacgggagccaacgttacggttccccacaagcaggcggcctgttccctgtgcagtgacacggacgccctttcccgctctaccggctccgtcaatactcttgttttccaacaggacggttccgtttccggtttcaatacggacggcccggggttcgcccgcgccatccgggaggaattttccgtggatttgcgcgatttgaaagtggcccttctgggctcctgcggcggggccgggcttgccctggcctacacctgcgccatgcagcgctgcgagcggctgacgctggccggaagatcggaagaaaagcttcaggagcttaaaaacaggctgagttcctttttcattgacgaacacaggctggaaggggcctccgaccgcctggcggcccaccagaacaatacgccccgtttcaatgccgccgtggaggaagcggacctgatcgtcaacgccacctccctcggcctgaagcccacggacccttcccccgtccccccttcactgctttccgcccaccatctggtttatgatttacagacgcatgacgatgccttccagatggaagcccgctttcagggcgccagagtttccaacggcctttccatgctggttcaccagggggccctttcctttgaacgctggttcggcatcaagccggatatttccgccatgcgccgggctcttgaacaaaagcatgactgacggcaccccccatttgaacatccatgctttccggaacgcgctggtagaatggttcaggcgcgaagggagggattacccgtggcggcggacaacggatccgtggcacatccttgtttccgagctgatgctgcagcagactaccattcccaccgttttgggaagatatgacagatggatgcgccagttccccactccggcgcatctggctgccgtggacgaacagacggccctgcgctcctgggaagggttgggctattaccgccgcgtgcgttccctccaggccatcgccagggaaatcgtcaacgaattcggagggcggttcccggacaatgcggaagggctgaaacgcctgccgggcatcggcccctacacgtcgggagcgctcctctccttcgccttcaacaaggcggctcccattgtagacgccaatgtcgcgcgcgtcctggcccgcattgacaattattccgtccccgtggattccacggaaggccaaaaatacctgtggagccgcgcggaaagcctggtggatccggaacatgcccgtgaattcaattcagccatcatggaactggggcaaacctgctgcagcatcagttctccggactgcctgctgtgccccgtacgccccttctgctctgcggaacggccggaaacgcttcccgtcaaaaatcccaagcctcaagtcacccgggtggaacaccacgatattctttacatccgcggcaaatccgtcctgctggccaaatgcccggaaggcaagcgccatgccggcatgtaccgcttcccccagagggaggacgagcacaccctttccctgccccatgtcctgaaacagacctacagcattacccgctacagggtgacccgctacatccaccatgtgacggatacgcctctcctcagggaaggagaggaattcgtgccgctggacaaaatccacgggctgcccatggcctctccggaccgcaaggcactgaactcccccgccctcggcaaactgctggaccatatcagatgaatgacagattgacgccggaacttgtcctctccgcctattgccaggggtgttttcccatggcggatccggaaacgggagaaatctccttttacgaaccggacccgcgcgccctgattccgctggacgaccgcttccacatcccccacggcctcaaacgggctttgaataaaaaaccctttgaactccggatggataccgcttttccggaggtggtccatgcctgcgcccggacggaccagccggaagaacaatggatagacggacagattgaagaagcatacggcaagcttcacgagatgggcttcgcccacagtgtggaatgctgggacgaggaagggctgcagggaggactgtacggagtagccctggggaaggcttttttcggggaaagcatgttccaccggaaaacggacgccagcaagatcgccctagtggccctggtgcaatacctgcgggcgcatcggttcctttttctggatacccagtggactacgccgcatctgctgaaattcggaacctatgaagtgccggcggaagaataccggaaaatgctgaagcgagcgctggcaggataataaaccatgttttcattgtccggaataaacagccggaatggattctatggcgtttattcccaactatggaaaatccggcagcgcaccggattgcaagaactgttggtcatttttcttcagcctttaccatcaatacttgaatcatcaagccgaaccctatgctcgaatatccagaaagcatggttccggcataaaaaacgccggaattgaaattggcggcctccgggaaaggcgagaattgtgaaggtatgtccacccgcgcacatggaacaatcggcccgcaggttcaagccatatccgccaaggctattccatccgctaaaaagcccgtggttccggagaaccacgggcttgtctattaacccttaacaaaaaggtttattcctgttccaaagccgcctgggccgcggccagacgggcggtcgggacacggtagggagagcagctcacgtaagtcaggcccagcgtgttgcagaacttgacggaagcggggtcgccgccgtgttcgccgcagatgcccagcttgatgtccgggcgggtggagcggccgagttccacggcaatcttcatcagcttgccgacgccgttctggtcaatggaagcgaagacgttcttcttgatgatttccagttcctggtactgcggcaggaaggagccggagtcgtcgcggctcatgcccaggcccgtctgggtcaggtcattggtgccgaaggagaagaactgggcggtttccgcgatttcgtcagccgtaacggcggcgcgcggaatttcaatcatggtgccgacgaggtagtccactttggcgcctttttcctcaaatacctgctgggccaccttgtcaatgatggctttctggatgtccagctccttcttgaaggccaccaggggaaccatgatttcaggcaccacggcaaagccttcttcctgggagacttccacagcggcttcaaagatggcgcgggcctgcatttccgtgatttccggataggcaatgccgagacggcagccgcgatggccgagcatcgggttgaactcatggagttcagatacgcggcgcatgatgacttccacaggcatgccgattttctgggccaggtcaagctgctgttccttcgtctggggaaggaattcgtgcaggggcgggtccaaaaggcggatggtgcccggcaggcccttgagcgccttgaagatgcccttgaagtcccccttctggtagggaaggagcttggaaacggcggctacgcggtcgctcttcttggtggagaggatcatttcacggacgaagtcgatccggtccccttcaaagaacatgtgttccgtgcggcagaggccgatgccggtggcgccgaaggcgatagcggtttccgtctgcttgggagagtccgcattggtgcgcactttcattttggtgcagtcgtcgcaccactgcatgagcttggcgaagttctggtaggtgcggctgtcttccggcttcatggtcttggagatcagaacctggatgatttcagagggggaagtttccaccttgccggcgtataccaggccgctcgttccgtcaatggagaggtagtcaccttcgctgacggttacgtcgccaacggaaacggtgcggttgttgtagtccacaatgatttcatctgcgccgcaaacgcagactttgcccatctggcgggcaacgagggcggcatgggaggaaacgccgccgcgggcggtcaggatgccttcagcggcaatcatgccgcgcaggtcttccggagaggtttccagacggaccagcagaaccttttcacctctgtccgcggcttccacgcagcgttccgcgttcaggtagatgcgtccggtggcggcgccgggaccggcgggaagaccgcgggtcagcaccttggcgctcttgatggcttcacggtcaaagatgggggtcagcagctggtccacctggtccgcaggaatgcggcgcacggcggttttccagtcaatcaggccctgttccaccatttcgcaggcaatgcggaaagcggccacgccggtgcgcttcccgttgcgggtctggagcatgtagacggtgcggtcctggatggtgaattcaaagtcctgcatgtcatggaagtggttttccagcacttcgcgaatgcgcaccagttcattgaaggcggcgggcatcacttcatgaagggcagcaacgggggcgggcgtacgcacgccggccacgacgtcttcaccctgggcgttcatcaggaattcgccatagaattcgttttcgccggaggcggggttgcgggtgaacgccacgccggaaccggattcctcacccgtgttgccgaagaccatggcctgcacgttgacggcggtgccccattcggacggaatgccgtatttctggcggtacacgatggcgcggtcattgttccaggaaccgaacacggcgccaatggctccctgaagctgttcccaggggcattccgggaattcatggccggtgcgttccagcaccagagccttgaagcgggagacaagttccttcaggtcatcggcggaaagcttggtgtcttccacatcctcgctgccgaagcgttctttcttgatggcggcgatggcggtttcaaaaggttcgtggtcttcatccggggttttctgcacgcccagcaccacgtcgccgtacatctgcacgaagcggcggtagcagtcccaggcgaaacgggggttgttcgtagccttcaccatggcttccacggatttttcattcaggccgaggttcaaaatcgtgtccatcatgccgggcatggattcacgggcgccggaacgcacggccaccagcaggggcatagcttccgtatcgccgaacttgcgccccaggatctgctccattctggcaatgccttccttgacctgcgcgtcaagctgggcgggataagtgcagccgtgatcgtagtagtaagtgcaaacctccgtcgtgatggtgaatccgggagggacaggaaggccgatgcgggccatttccgcaaggttggcgcccttgccgcccaaaagatttttcatgctgccattgccgtcggcggaccctccgccgaaagaatagacgaatttgtcagtagatgcgctgcacgcgcaggaattggtggacatatcgattattgtagtcgaattaatgattctgcccaaacaccgaccaaaggagccaacagaagacccaatagcgagttagggtcgaacgaggatgccttcggccccttgctttgtcaatccgaaattgtacggaaaacaaaaatatttttcagagttttcgggagaaagaaagcatgccgaacccctgcttttccagcctgtcccgtccggagccgctcttcctccgggcaacgccgcttcctgttttccggcggtcccggaattacctgggaataaaagcgcagcgagtttcttttcatggctgcccggaaaagaaaaacggccgcttatcaaccggataagcggccgccggaaataatatgccctgttttttatgccttgcagaaggtgtcttcatccgcacagtcagcctgcacccacttgacggaggaatcaccggaggctatgtgcacgaggcaatggtacacggcttcctggtccgcatccagccgggcagccatctgggcggctgtttccggggcggttcccagagcgctcctcaccctgcccagcagggccaggaaggaacccgccgctttcttgccggcttccacgcccggctgatgataggcgttgatattgaccagagaagcatagaaggagacggcgcgctcaaacagggcgatcagcatgccgagcgttttggcgttcacctccgggatggagatggtaatggaggaacggccggattccgcaagcgcctggcgggtgccgcgcaggaagccctgcaggaagtctccgcaggtggcgcccgcttccacttccaccgcatccgcggaacattcgcgcacttcaatgaaagtggcgaagaagttgttcacgccgtcacggagctgctgcacataggcatgctggtccgtggagcccttgttgccgtacacggaaatgccctggcagacttcgttgccctccagatccagccgtttgccgagggattccataatgagctgctggaggtatttggaaaagagcaccagggcatccttgtagggaagaaccaccatgtccttttcccccttgccgccggcggccttgtaccaggccagcgccagcttcatggaggcgttgcatttcacgcagtcccggcgcgtcttttcgtccatcaggcgcgcgccttccagcagttcatccacgttcacgccctgaagcacggcgggaaccagccccaccacggacatgacggaggtgcggccgcccacccagtcttccatcgggaagcgcttgagccagccttccgcctcagccgttttgtccagccgggaacccgctcccgtgacggcgaccgcctggggagcgaattccagcccgttcttcctgaagaaatcctgggccaccagcatgccgttgcgggtttccggcgtgccgccggatttggaaataacgacgacaagcgtttcttccagagggagggattccagcacccggtacatgccgtccgggtccgtgttgtccagaaagaacatgtccagccccgccgcaggaatggcgtccgccaccagctccggaccaagagcggaaccgccgatgccaatgacgagggccgcggaatattgttccgcgcggggaggcgttattttgccgtccagaacgtcccgtccgaaggctttgacgtccgccaggggaccatcaatggcagccttcaattccggcgtgggagccagggaggaattgcgcagccagtagtgccccaccatgcgtttttcatcaggattagcaatggcgccggattccagcgccttcatgtcggcaaacgccttgtctatccgcccctgcatggaagacaggaacgcatcgtccagcggaagtttggaaaaatcaagggagatgcccagttctgggtagcgaacgagttgttgtgcgtataagctcatgatggtcatggattggaaaaagaattaccggagttttttcaggacgcttttagcctgcacgtctccctgatccgccgctttctggaaccattcccgggctttggccatgtccttgggcaggccgaaaccggtctgatacatcacgcccaggttatattgttccgaggcatagccttccacagccgcccggcgacgcgtgcgggcctgctccctggcttccgcagcggttagtcccagaacccgcgccgcatccggccacgcagctccgaatctggaggcggaaggggcatagccggcggctccggccttgcggtgcatttcctccgcttttttcttatccctcttcacgccgtatttgccctggtcatacaggaacgccatgccccagtagccacgggggcagcccagttccgccgcctgctggaaacattcaaaggcatctttatactttttggaacccatggcgagcacagcgtcggaaatgtggagttccgcctccttcaaaccgggaaattccgggatggccgcccattcccttttcagttcctccctgtcccttttggacttgggaggcatgccggagggaccggaaaaacggaaaagggggaagtagccctccatggctcccatgttgcccaggccggacatgaggaaaacgccgggagataccttccacatgtgcatgtactggatgcggccttcctggagggattccctggccacccattccggcatgttcaccggttccccgaactgttccgtcaggcccaccagaagggccttataggcggatttcagtttggtttcatattcggaaccgcggtgcttgctccgggaatagaagacaacggccctcaagccgccggaggggtcatagtcaaagttcagggcaaaggtctgaccgcctatggcctgcctggttttaaacacgccgttgagtccggtgcgtgcgaggagggcatccgtgggcggaccttcaagctgcttgctccgcctcagggttttcagcacctggtccttgtccattcccacctccagcccctcatagagagcggcaagaagaggggcacacgtgagagcgaagagtccagcaacataggctagttttttcatagaaaaaagtaattgggcggctttctatcaaagcggaagcattttcaaaaggacaaaatgcgtcagccacagagagggaaatttttcataaaatattcattttcaatctatccacaatcttttcaaataatcctccccggagaaatccggaggcatggggtcacgggtcaggcggaaaccgggaacggcacgggccaccatcctgcggaattcctcgtggctgagcttgcggcagttgctggtgcacagcatccagccgcccggttccaggcattcgcgcgccagggccaccagctccccgtagtgggattccacccggaacacctttccgcggtcatcccgggaaaacgtgggagggtccagaataatgccgtgaaaggttcgcccctgcctggagaaccgttccagccagcggcgcgcgtcccccttgcaaaagtactggccggaggggtcaatgccgttcagaacaaaattttccctggcccagtccaggcacggctgcgccagatccagcgtggttgtctgcgctccccccagggcggcgtaaacggaaaaggcccccgtataggcaaaggtattcagcaccctcatgcccggagcgcttttttccctcacccggcggcggtggtcgcgctggtccagaaaaattccctgggaataaccggcggacatgtctattttgaaacgcactccctgctctagggccgtaaattgcaggggaaggagcggcccggcgatctggacgggcgcttctttctggttttgttccagttttttgtggaatacgggcaggcccgtatcccggagttcgctttccaggtccgcaggaatggaacatccgcgcgtggagacgagaatacgatccgccatctgatccacaaagacaccgggaattccatcccccgccccgtccatgacccggaacatatccgtatccggcggaatcaattccctgttgcgttccacgcaataatgataatttctctccacggcggagcaaagagtaacggatgaagaacgttcccgcaatgtcaaagaagcaggagcctcatttccttcggagcaagagttccgccaggaaaaacggtcatctggacggccctccttcatcaacagagacattaaaaaaatcgcctgcaaggctggaccttgcaggcaaaaacgcctttaactgctggcaggacaaggttttcaggctttccggcggcggcgaaccatcagggccgccagccccagcagactcagggatgccgtagccggttccggaacctgcaagccaaaagcgttgagaatgtctgtatccgtggcttcggtattaaacgtcgccagcttaatgtcagtgaatgtctccttcgccgcgttcgtccagatactggattgatcccatttcagagagcttgtaccggaggtgaaattaaaagaaactgttcccaaggtttgagttccgctgtacagggtagctgaggcagagcttccatcctcgcttttccgcataatcagcgtgagaagaagactgcctctttcagttgtcgccgtcatatcaaaactctgacctgcataggagaataaacaggtatacccgccgtctgcggaggaggaagtcagctgtagtgcattaccagacgcccccccgttggtacgtgaggtcgagaaaatattttggggagaggaagtatttcttgtttccgtaagctgaaaagaaatggcgaaattgtccaaggacgttcctgttgttcctccactccacgtcaatgacgaattgccagaggaaagaacactgttctgaggcttagtaaggctcagaagcgtaacaagatcaggactttctgcgttgacccacccgggcagcaaaaccgccgtcataatagacgatacaaataatttcttcatcacggacagcttatagccggattgactatccgctgtcaactttttctaaaagaatttatgcagataatagggagggaaagcctgataaaaaatacagaagaacaaaaaatgtccgcaagcatcttgctccgcaactcattcatgaattcaagaaatgtttgtgatttcattgagaagaaaggaattttatgttgtttgaaagttattgacatttaacaacttaattatctcattattgtttctgaatttttacagcagtgctgaactgcttcagcggatagtcaatccgcccgcaaaaaagaggccggatttttcatccggcctctcgcaacaggtatttacctgataaacaggaaattccgtttagtcagcgtactgttcgttaagagcttccattatttccctggaagcttccggaatgttggtgcccgggccgaagatggccacagctccgtgttccttcaggaagtcatagtcctgggcgggaataacaccgccgcagaagaccaggatatccggacggccctgcctggcaagttcttccaccagggcgggaagcagcaccttgtggcccgcggccagagagctcatgccgatcatgtgcacgtcgttttcaatcgccattttggcagtttcctccggcgtctggaagagcgggcccacgtccacgtcaaaaccgaggtcggcataggcggaggagaccaccttggcgccgcggtcatggccgtcctggcccattttggcgacgaggatgcggggacgacgccccgtgcgttcggcgaagtcatccgtcatcttgcggacttcctccaccagcggatcttgaccataggattgggcgtacacgccggtaatgagtttgattggtgctttatgacgcccgaagtgtttttccagggcggaggagatttcacccagggaggcgcgggccttggccgccttgatggcaaggtcaaggagattgccttcccccgtgcgggcgcattcggacagggcttccagcgcggcttcgcacgcggcggagtcccgttccgcgcgcagtttctgcaggcgggcgatctgggcttcccggacggtggtgttgtccacttccagaatgtcgatttgggcttcctgttccaggcggtatttgttgacgccgatgatgggttcctttccggagtcaatggcggcctggcggcgcgctgcggcttcttcaatgcgcatcttgggcagcccggtttcaatggccttggccatgcctccgagtttttccacttcctgaaggtgggcccagcccttgcggatgagctcattggtcaggtattccacatagtaggaaccgccccacgggtcgattaccttgcagatggtggtttcatcctgaagatgaagctgggtgttgcgggcgatgcgggcggagaagtccgtcggcagggcaatcgcttcgtccagagagttcgtgtgcagggactgcgtatggccgcaggcggcggccagggcctcaatgcaggtgcgggtgacgttgttgaacgggtcctgttccgtgagggaccagccggaagtctgggagtgcgtgcgcaaggccagtgacttcgggttcttgggattgaactgcttgatgagtttggcccacagcacgcgggcggcgcgcattttggccacttccatgaagtaattcttgccctgggcccagaagaaggaaagacgcggcgcgaaggcgtcaatgtcaatgcccgccttgatcccggtgcggacatattccaagccgtccgcaagggtgtaggccatttccaggtccgccgtagcgccggcctcctgcatgtggtagccggagatggaaatggagttaaacttgggcatgtacttggaggtgaactcaaagatgtccgcaataatcctcatggagggatcaggcgggtaaatgtaggtgttgcgcaccatgtattccttgagaatgtcattctggatcgtgccggagagctggtccagcgtgcagccctgttcctgggcggcgacgatgtagaaggccagcacgggcagcacggcgccgttcatggtcatggaaacggacattttgtccaagggaatgcccttgaagaggatttccatgtccaggatggagtccacggccacgccggccttgcccacgtcacccaccacgcgggggtggtcggagtcatagccgcggtgcgtcgccaagtcaaaggcaatggaaaggcccttctggcccgccgccaggttgcggcggtagaaggcattggattcctcagccgtggaaaagccggcgtactggcgcaccgtccaggggcgcgccacatacatggtggcatacggtccgcggaggttgggagccacaccggctgtaaagtccaggtgcaggcagtcgtcgtacacgctttccgagtaggtgggcggcacgggaatttgttcattggtcatccaggtttccgtttcggaagccggggacggggcaccagccttgatttcaggataggaggcggatgcaaaatcaggaatattgctcattgggtggaataggttggtggttgttagaggccgattttgttttgaatagcttcaacggtgttgtagcagttggccttgacgtggatgaagatgtccacgccggcttccttgaatgcttccacatagtcggccggataaccggcaagggccaccatcatgtccggtctggtctccctgagagccttgcagaaggcggggacgatttccggataagtgtcatccgtggagcagatgacgcatacggcgcagccgctttccgcagccgccctggccgcgtcttccggagtttggaagccggacggataaaccacatccagaccgccggcgcgcaggaagtcgcgggagaagtccgcgcgggccttgtgctggcgaagcggccccatgttggcgaagaagaccatcggccgggaacccttttcctccacccaggcgtcagccttggcgagcagggattcaaaacgttccgccaggcggcgcttcggcagggcttccatttccagaggttcgccgcacttgcagtcaaccccggccaccagggccttgttgatgagacaggtggaaaagccttctccggcggccttgcaggcggagtccacgctcatttccacttccgggagctggatatccgcattcttgcagcagccgtgccccttgtgggcggagcagcaggagccttccgtcgcctccagtttcttctctgccaggttgacatactggttgacgcccacgatggactgccggcgctggtccgccagttcgtaacgtttggcggcggtggcgttcaccttcttctggatgctgccggctttgagagccttgacgatgccgccttccttttcgatgccctggaagaattcccatatcttccgggaggcttcatccgtcaggttttccaggtaccaggaaccgccggcggggtcaacgaccttgtccagattgcattcgcccagcagaatcagcgggcagttgcgggcaatgcggcgggagaattcgtccggcatgcgcacggcagcgtcaaagggcagaacgtcaatactgtccacgccgcccatgatggcggagaatgcctgggcggagccgcgcagcaggttgacccagggatccaccttggagagggtccagaaggaggtgcgggcatggagcctgattttggcagcttcctcgcttcctccgcattctttgacgatgatggcccagagttcgcgcaaggcgcggattttggcgatttccaggaacaggttggcgccgatggagaccgtaaagcgcatgtgcgccgcagtttcatccacggagaggccgcgttcctccatggcgcgcagataggccacggcagtggacagcatggcgcccacttcttcaaaagcggaagcgccggaatccgcgtaaggcagcccgctgacgccgatggtctggaagccgggagcgttggcgacggcccatttggtcattacggccatctggtcatagtaggcgcagatgccttttcccccgcaaagggaacccttcatcacagctttccccaccgggtcatatagaacgccgcccctgagatccgccgtcttgacgccggcggccttgcaggtgttcaggaacatggagagggttcccaggccgcaggaaccgggagtgacatatacgggaagcccgtccagccggacgcccttgagagccgtatcccagtcagcctgcttgtgcagtttcaggccgcatttgcagttgagctggatgtttacggcggtcaggccgcgttccaggtcatgcagaagcttggcgttgaaatcctcaggagaggaagcgggaatgctctgggcgatttcgcagggcttttccatatagcccaaggcgcgcgttccgcggcggtacggaaattgcccggcaggcattaccggggaatgttcatcccatttgttatagatgggatgcagggtaattccctccacaagcttggtaaaaagcttcttgtcaaaatcagcccctttcagggcagcgactgctgcctcgcgccattcggcgtatgtggctggtgcgaattctccgaaatcaatttccggagccgttgttttatttccctgttgcatggcgaagtcaatgggtaaggcctaatatgttggtttttaactatgcgcaaaccaggccaagtttaaagcgcaacattattttaggaaatcaaagtgtaaagtccagcgagaaaaatcctcccgtccgcctgcaaatgcgaatttgcttcatcacgcgaggcaaacttgcaaaaacgatgtccatggcgtaaatacgggaataagcatgcccccttccactaccgtcaaactccctccccagctggtcaggcagctccgaactttccggcgccgcctcagaacggtgaagatgctggaagccgtatgccttgcaggcattgccgtcattctttcctacgcgctcctgtacctttccgacagattgtgggagacgcctcccgccgtcggctggctcctgtttttcatcgccgtgtccggcctggcggtgtttattccctggtggagtttccggtgggtgtggcagaggcgcacggaagcccagctggcgcggctgatttcccggacggacgcggccctgggggatcgtcttctgggcgtcatcgaactggattcagaaaagcacggccgccaatacggttccgaaaagctgaaagaggcggccatggagcaggtggcccgcgaagtgtccgcccgggatctgacagtgaacatcccccggcccagccacaggaagctgttcgtcctgctggcggttctcgccgcatgcacggcggccgtatgtgcggtaagcccggaagcggcagggaatgccctgaaacgctgggtccgcccgttcaatcctccggaacgctatacattcacccagctggcccccaccccggattccctggtcattcccatgggagagagctgcctgtatgaaatccggctggcggagggaaccaaaacccgcccgcagacggcagagtattttttccgcaacagggtgagccagcaagcgcctcttgcggacggcgcatacaagatccacatcccccccatgcaacaggcggacagcctggagttctttgcaggggatgccgtgcgacggctgaacatcatcccgaaggggcgcccttccctgctgggagccgaagccggcgtagcctatcctgcctatatggcgcgcgccaacggcagggaagccatgagagcaggagttatttccgccccggaaggctctacgctgacgttgaaggtgtccgcctcccagcatctgcagtctgcggaggacgcgcagggccatccgctccgggtggaaggaagcaacgtcatcattccgaacatccttttggaaaaagagcccagggaaatagagcttgactggatggacagcgacgggctggctgcttcccggcccgtgaagatacaactggaacccattgaagacaaacagccttccatttacctgagaggcggcgaaaacgaccgctacgtactggaggataccagcattgagctggaggtagaagcggcggacgatttcggcctccgggaaatgggggtggaatggcagggtgaaaaatccttttacgacggcaatgaggatgaaaacggagcctcagctccaaaaccggccggtgcggacaaaccggcgcccggcctccgcggggagaaagtgctggcggacggacagcccacgcagaccgggctgaaaggaacattcctgttccaggccagggcgctgaagctatctccccagcgcgtcgtcatccgcgggtttacgcaggattacaaaccgggaggcaaacgcgtttattcggaacccatgattattttcgtcctttccaagtccgagcacgcccagatgattcgcaatgaactggaacgcatcaccagcgatctggaaggcatgatccgccgcatggacgccatggcggacgaagcaaaacggctgaaaggaatggaaaacggcaaattgaaagatgcggagtcccaggaacgcctgcacgccctggccgatgaagagcaggccaacaggcgcgagttgggagacttgctcaaccgctcggaaagcctgtttaaggaagcctcccgcaattcccagatagacccggccggcatgaaggaattcatgaaaggaatttccatgctcaaacccattcccgacgggtccatgaagatggcccagaagctcttccgggattccgcctccgagagccgctccgagcaggaaagcaggaaggacctggacgacggggagaattcccattccgaagccacacaggcgctgaaagacaccatgaaccagctctccaagtccgcgcaggacatggaggccagcacattcgtggcacggctcagacaggccgcatccaaggaggattccatcgcccatgcgctggccggtcagatcaacaccattgcgggcatgaccatggaggagcttgacccttccaccaggcgtgaaatggaaaccatcgccacccttcaaaatgcctccacgcaggacataggctggattctggaagacctcagctattacaagtcacgcaccggggagcgcatttacagcgacctgtacaaccagatgaacgctttctccctccgggagaagctggacctggtgcacggcaatatcctgaacgcaatcacagcccgctccattgacgagtcccgcctgtatgcctccactctgcgccattgggccaaattgatagacgactataagaagagccgccgcggcggcgggggaggaggaggcggcgggggaggcagccagtcctccatttccgacgccgagtttgaattcatgctgaaactcatccgcatgatccaacaggaacaggatatccgcatgcgcacccgcgccgccgaacaggaacaccgaaaaaaacttcccccccctgccccatgaataccgccaattttccagccatgattctggcgctttccctgccctgcgccgccgctccggctcccgctccggaatattccgccaagcacagggaaacggcatccaaactggcagtacaacaggacgagctccaggcggacacttccgaccttatcctgggagaaaccaatgaggaggtagtggacctgctgaaaaaatgccgccatgccatgaatgacgccgtggacctgctggaagtttacaataccggaggccagacgctggccgcgcagtcggatgtgattgaattgatttaccaggcagccaaggccaagatgaccggggccgacggccggcccaagccgggaggaagagctcttatggacatgctgcgccagctgctcggcatggatagcgactcccagtccgcggaacagcaggaagggaatgggaaagggcaggaaggttcccagagaggcagcggcaacaatcccggacgcggagcgaatggaaaatccaatatggcctcctcccaggataaaggcgtttccaatccggacacggctgcggaaacgcgttccgttcccaaatccaccggcatgtccgcagacgacatgccttccgaattccgcaaggcgctggacgcctacaacaagactttgcagaagtgagacgcatctctccggacagccttttcacgcatgaacagcaacttcccgtttccatgaaaaatccccgcctcctgcttaccgctttcttgacctgctgcatgacggccgcaccgcaaaacgcagcggcccaatcccccatgagaacgtcttcttccgtgccgccccaggtggaactgatgtatgtgaaggggctacgctatcttcagaatgcccagaaaacggatggaacctatgatggaacttacgggagggagcctggcatcatcggtttttgccttatgtccgtgctggctcacggagacgatccgaacgcggggccgtacgccaccatggtgcgccgctgcgtagattacatcctgtccaggcagaacaaggtatccggctacattggggattccatgtacaaccacggcttcgccactctcgccctggcggaagcctacggcatggtgcgggacgatcgcataggccccgctctccgcaaggccgtggccctgacactgaccgcccagaaaaaaaacaaaacgggaggctggcgctattccccggaatccacggacgcggacagcacggtgaccggctgccagatcgtctccctgttcgcggcgcgcaatgcgggcattcccgtgccggatgaggcctttgaacgcggcctcaagtatatggcttcctgccgcgacaagaaaggcgcctacggctacaccgggccggcgggtccccgcgtcaccctcacggccatcggttccttgacgctgtccctggcgcgccttaaaacggacccgtccttcaaggattccctggcctacctgaaaaagcacctgaactaccgggattccacttatccgttttattttgaatattacatgtcacaggccctgttccatgcggaccaggaagtgtggaaggaatggaattacaaaaatatgcgctatctgggagcctcccaggcgcccaacgggtcctggctttccgatcattccgcggcatattccacttccgccgccctgctctccctcgcgcttaattatagatttctacccatctatgaacaatagaatccgcctttccctgatgctggccccggcctgcctgctgaccgcctgggccaattccgtcatcgacgtggttacggataacaattaccgcctccgcggggaaatcatttcttacggaaaacagggcatcgtcatcaagcacccggccatgcgccagaacgccgtcattctcccgtcgggaatccgcgctctctactttacgggaaccgcctctccggatcttcgcgcccgggacaaaattttcatggctgcggggcacagggacatcatcccgtgcaatatcatttccatcacacaggacaaagtgcagtaccgggacatactgggccatgaacgttccgttccccgcagccaggtggccgggttccggctgaatacgctgcaggaaaagggcttctggcaggaaccgctgatttttgacaacagctgggtttattccggcaaccgggaggaagactaccgcacccaggcggggagaaaactgatgaatgccctgaagccgaaaatccagggagacaagtaccagtaccggctgggcaacaatgattaccccacctggatacccctgtacaagaatatcggcttggatccttcctcctttacctttcgcaccaccatcaccatgaacggcaataatgaccgctccggcattgtcttctgtttcggggggaatgaaaatattcctttccggtccaattccggcagcaacctgaacaggctcatgctcagcatctcgcccggaaaatgcaccctgctccgggaacagaagtccggcatcctcgtgctgggggaagcggccattccggcccccattctgacggagggcgtggatattcaattgacagcctcccgccagggtggaaacaagcaggtttacgagctgttgataggagatctgccgcccagactgataacagaccccagcccgccggaacagccattacagggagacgccttcggcctccagatggaagggcacgtgtccctgaccatcagcaaactgaccctttcctccatcaccctgagcgccaaatccgtggccaaaaacgggaatgcagagacagaccttgtcctgacaaaggaagaagacgccattccgggttccgtcagcggttacgatagcaaaaccggaacgctgacgctttccacggacaaggattatccgggcattccccgtgatctttccatcccgtccaagtacctggataccgtcttttttgcggaacagaacaggaaagacgactcccgccccccagcccgccacagcctccagatgaaggacggttcccgcctgcacggagatattctgagcatggattccctgaatatcatcctgcggcatccgcagctcggacagatttccctgccgctgaaaaacatcacccgcgtggaattcctgaatcccgcccagccatcccgttccactccctgattgaccccgccatgaaacaagcaatgacgcttttcctgtgcgcctgcgccctgccgaccgccctccttctgccccatgctcgtgcggaaggggtcattacgcttaaatccggggaaaaactgccgggcagcatggatacgatgaaccgcccttacctaaaggtccgttccagcattctttccaaacccgtggatgtccatatgggggagcttgacgagctggtctcttcccgtccgctggaaataccggaacagttttccatcatcaggctggccaatggggacgaggtttacggcaccctgaaggcgctggatgcggaaaatcttcaactccaaaccgcttggggcggtctgcttcaggtggaccgcaaatatgtgcgccacattgggttcgactcacagaaagcctacctgcgcaacgctacggaatccctgcagggctgggagtcttcagccaaaagcacgctgcccgaatgccgcaacggatactggctcatgcgcggctccaataatacggaactgcaaacttccttccccatgccaccccgcctccatgtgcagttctccctttaccataccaatacgttccggattaatcttgccctctggcaggattccgaatccggaaacagcatcaacctggatctctccctggaaaaagcggaactttccaagaacagttccggccagtaccgaacgcttggcagggtgaaaaggaacacggagcggaactggtatgccgacaagagcgtcaagcgttccgacgttcatttttacgccgatccggaaaagggcaattattacctgtacgtcaacggtgaacaggtagcctggtgggaggaagtcaaagagatggacactatctttgaaaacgagagcggagacgatgaaggggaagatggagaaagcgccgggaaacacgaattcaaaccgggaaacactcttgccctgggaggttatgacagcttgaacatggccgtgttccatttgaatgtatttgactggaatggagccattccccatctggaggaggagctggacatcatttcccgttacgacccggccgcccccagagacaaggctctgctggtaaacggagacgtgctcagaggaaccatttcccttcaggaggaaggctccatccgcatcaagtccgaccattatgacgtcaccattcccaccgtcagggtacgcgcactgaaccaaaaaggccatgaagagaaagaccttccggaagacagctcagacacccgcgttttcctgacggaccagagcgtcctttccctggccctggaaactatccggaacgggttcatggaagggcgctcctccgcagtcggcaaggtccggattccgctccaatccgtcagaaaggtccagttcaacctgcaaaacccggagctgaggaagcagagggaaacgccgttccggtacaaataaaggctctccaccaggccgtcctttccggagaaagccggctccgggaaagccagaagaagcatccgttaccgctcctccatttcctccgcgcgccgtacggcgcttttcaccgcctgaatccaggcattgcggaagccgcattcatccagcgcattcagggcggcaatcgtggtccctccgggggaagtgacctcatcccggagcgccatgggatgcttcccggtccgttccagcatcagggaagccccccgcatggtttctgcagccagtcccaaagcggttttcctggacaatcccatggctacccctgcgtctgcaagcgcatccagagccgtaaacatgtaggcggggccgcaaccggaaatggcggaaacggcattcatcccggattccgccaccttgtaaacggagccgcagccggaaagcagcttccgggccgcctcttcatcttcatcttttacgccgtttcccgtactgtaggcgatgacgccggccaaaaccatgcacggggtgttgggcatggcgcgtataatgcgcgttccgtcgctggcgcaggcttccatatcatccagggaaacggcggcagcgatagaaatcagaaggggaagctccgccccccgttcggaaagagaggaaatgagcggaagaacgccgtgcggcttcacggccagaatcaggacttccacggcgtccgccgcatccgcctccgaggcagcttcatgaactccggggtattcctcctgcagggcctgcacgttttcatgatgatgatcgtacacccaaacttcctccggaaccgctgctccggctttcagcatgccccgcaacagggcgcctcccatttttccaagtccgatgatacctgttttcatggttgatgattttttacagtcaacatataagcgatttatagaaaaatggaaatgccaattaaggcccatggctatggacgagaatgccccatttccgcgtttgttccctccggccctgttatcaacgtctctggctggacatgcggttgggattttgcgtactgggccgcgttgcagaaacagccctcaatatggtcgttgacaaacccggttgcctggaaaaacgcataacagatcgtcggaccgaaaaacctgaatccccgccttttcatgtccctgctcatggcttccgactccggagaaacagcgggaatctgagccagagcgctgaaatggttaacaacgggctgatgattggggaaaaacgacaagacgtaccggtaaaaactgccgaattcttcctgaacggccataaacagtttcgcattattgacagcgctgttgattttcaaacggtttttgacaattccatcaaatcgcatcaaccgttccacatcttctgccgtcatccgcgccactttctccacatcaaagccatggaaggctctccggtatccttcgcgcttccggaggatagtaagccaggataatcccgcctgggcgctctccagcaccagaaattcaaacagggttttgtcatcggaaacaggcctgccccattcttcatcatggtattttatgtaaagttcatcggttccggcccagccgcaacgcgcattgatgatatccttcatacggttgcgccttagaattcctttttcctgaacagccacgccgccagcgtcatgtgaaagacgaagtatcccagcgtaatcagggccagggttccgaacagggaaaggggaataagccgtccgttcagggcggaatccgtcacggaataaatctggaaattcggaaaaaccagggaaaagagcctgctgcccgccacctcccaccaggaaagtccatccgtgccggatcccacccacagggaaagagcctgcgtctggaacagccccgccagatagatcatgaacgtcagcagcgcgctgataatggtgccgttcgtcacgcaggacatcaacagcgtgagggaggaaagcacgacaaactcgcacatcatcacgcccagccccgtctgcacgttccaggtagctccctgaaggcggatcctgtctaggtacggctgcatttcctccaacgtataacggcctttcagagaggctatctgctccgccaccaccgtatccgtccgcatccacagcaccagcgtcattacggcatccatcagcagaacggcaaccagggtcaaggccagcacccccagcaccttccccatcagatagtcgatgcgcggcaccggtttgcaaaggatagtgtatagaatacggtcctccgcatccctgggaataatcagggccgtggccgccacgcagaaaaagaggccgaacacccgcatggcgccgtaggcggagtttttcagcagcacgagttcattgattcccccggtttcaggccccagcaccgcgctcaggcggaaggaactcagagccagcagcgccacagcgaagagcccaagaaagagaaacaccttcatgcgcaccagctgcgtaaaggtggtaccggcgattacggccatgcgcccgggcgaaggtatataaccggaggtaatccatgccatgcggatcatcttgccgtattccggagcaaataaaagagctttttatttcatgtgctgaactccttccgccttgaagaagcgcttctcccgtgttctcatggagcgcgtatgagtttacgatcccagctggaagaactgctcccggaacttttgccttccgatccggcccaggccattaagggaacagaactcatccgcctggtgcgtctgaggctgggggaggaatattcggacgcatccctgcgctaccatttttctttcatggcttccgagccggattcggaaatcgccaaggtggaacgcggccagggctattacaggcgcatgagggaacgggacgggcagcgcgctcccagagggcttttgcccctgttcctcggggaaaacgaaccggacgccctgaactgccgcgccaaggcgctggccctggccgtgcgccagtacgataccacgggccgcggcgttttcgtgttcagtaccagtgaaaccggaacttcctgggtaaagccggatctggccgttgtggaatggccggagggggaatgggaggaaaacgcgcttgtttttgacaaaagcgcacttcagcgccgccgcatgatcggggcacccatgatgggcatccgcagcgtctgcgtagcccgcatgcccggtggagaagacggcagaagggaatttttcaggactctggccacgtcccgctgggcacagtgcggagaactggtcattgtgggggaactgccggatgattccgaatgcgccgccctccgcgggctggccgccgagttcggcgtaggggtgctttgcctggaaattgcggacgaacgcctaggagaactccccggcgcggaggaaattttcaaagccggagatgaagaatgtgccgccctgctggcggagctcacgcccgtacggctggccgccggaagactgaagacgctggaggcagatacgggggaaaccctgggcggggaattcggagccctgttcgactggctggccgcctgcctggaacgcggcagcgtggaagaatatgaattccgcgtctcctgttactgaatgcggcggagagattcttgacagaacttgcgtattaaattaaagattttcccggctccaacccgcccttccccctgacatggaacaagaaacactggtttacccgcttgcggacaatactgttctgcaagacaaatatacgatattgagcgtgctgaacgccggcggcttcggcatcacgtacctggctctggacaaccccggttcccggtatgtcgtcatcaaggaatgcatgccggacgcctacgcctgccgggatatggaaaccggcgttgtccatccccggaacgaacagaccgccgtcaatttttcccagagcgtttccaattcccggcaggaggcttccgtcctgtcccagctcaaccatcccggcattgtccaggtgtttgacatgtttgacgccaacggcacctgctattacgtcatggagaatatccagggacagaccctgttcgacctgatgaccaccatgcacgccaccgggcaaaccatggaaccggcccaggccacggatcttctgttccgcctgctggacatcctgcactaccttcactccatgggtgtgtaccattgcgacatcaagccgagcaacatcttcatccagccggacggaacgcccaagctcatcgacttcggcgccgtgcgcaccaaaaccctccagcatcaggggctcgtccagatcacgcccggctataccccgccggaattctaccccggacgccggagcgaaataggcccctggtgcgatatgtacgaactgggcgccacgttctacgaattgctcacgggccaggtcccccatcctgcggaccagcgttccgtggtggaccgcaacccgaaagtgaccagttacgcggccctgcggaaaacttatcccatgaacttcctttccggaattgacaaagccctgtcgccggacgaacgcaaccgcttccattccgccaaggcatggaatgactatatcaacgccatggcggcggcaggcaccctgcaggccggcggagtatcgaggaaggctcttccccaggccaggaaaaaatcttccgcaggcacggctttcctcatcatcctgctcatcgcaacggcaatcggctgggtatgctggaagcagggtctgcttaacttctgattccggccgctttccggcggaaacattgaagggtgatgtccgcaaagacacgccccccaacgcaacaagggctgaacctgacggtccagcccttgccaatacggaattgaacgggagaaccaacctttacaggctttccccgaagtcccggcggtatttggccgccagtttttcaggccagtcgctcttggcgcggagcttgcccatgaagaagcgcaggacgggcggttcctccacaaattccaggccgccaatcaaatcgcggttgtcatagagccacttcatgcggtccgccacgtatttcacctgggataacgtgaaaacacggcgcgggaaggccaggcggagcagttccacatccgccagaatgtccttgccgttttcgtcgcggacgctggaaagcgtgccgcgttccatgccgcgcacgccggaggcgatgaagaaagccgccgccagagccccggcgggatagtcctcctgcgggatatggggcaggaaacgccctgcgtcaatatgggcgcccagaccgccagcgggggtcacgcagggaatgtccatgtccaccatctggccgatgaaatattcaatgaaggaggggctctgggaaatcacggtcaaatccgtggtttcatacaggcctacggccatggcctcaatttcccgcacggagatgccgccataagtcaaaaagccttcaaagagaggaaccaggtgctccattttcttggcaatggcccggtcgttcgtgcagatgccgccgccgcgggaggaggaaaccttgcgggcggaaaaatacaccagatccgccagtccgcacatggtcttcaggatgtccgcgcaggacgcatccctgaactcgtcttcacgcatcttgatgaagtaggcgttttccccgatcagggaggcgtccagcaccagcatgatgccgaattcatcgcaaatgccgcggatttcccgcatgttggcaatggagaagggctggccgccaatcaggttggttgaggcttccatgcgcacgaaggggattttgcccgccccgtgacgggcgatgcagtcccgcagcttgccggggtccagattgcccttgaagggattggtgctgaccggattgacggcttcatcagccaccagttcctcaatcttgccgccgttcaggtcaatatgggcgtgcgtggtggtgaaatggtagttcatcggaaccacgtccccgggcttcacgaaggtgcgggcaatgatgttttcacaggcgcgcccctggtgggcgggcagaaggtattccttgccgaagacatcccggacagcctgcttcaggcggtcaaagctctgggaaccggcataggcgtcatccgcacggaacatggcggcgatctggttgtcgctcatggcgttgacgccggaatccgtcagcatgtccagatagacgtcgttcgtgctgagctgaaaggtattaaacccggcttcccgtgcggcttccagacggcgttccacgggaacaagatgcagcttctgcaccacgcggactttgtgcagttccaggggaatttgttccccattgtaaaatttgacaacgtttgatggttctgaattcataaaataaaaggtaaataaaagtgtagcagaatgaatcttttccgcaacataaaaggacagatggcttctttttgccccccgccggaaaggcaggaatgacgctgaaaggaaaaatgtggaactttccggagggagtttctagcgtggcttcctatgaaaaaatactggaaattgattcaacagcacctgggcgtggatgctgacggcatccccggccccaagacggctctggccctgctggaaaagctggacatccgccaaccggaacattcctggcccagccaggaggacgtgcgttccggaaaatccgtcttcggccgtgcgggagatgaaagcaacatgaccagcatcaagctgccttatgtcatgcggctggcgtgggaaacaaacacgaccgtttccaccatgcgctgccacaagctggtggcggaaccgctcgtccgcatcttccaggctgctctggaccattacggcatggagaaaatcagggaactggggctggacctgtatggcggctgcttcaacaaccgctccattatcggcggaaaagccacatccatgcatgcctggggcatcgccgtggacatggatccggacagaaacggactaaatgtctccgcgccgaaagcggttctgtccggaccggagtacaccgctttctggcaattcgtggaagcggaaggggccgtatccctgggacgctcccgcgactacgactggatgcacttccagttcgctactctttgaccggagcggacgcgaacgtcctccagccctcctcccagcggcggcggagggctggccagtcctcaccgttccctccatgccccataaaagagcgctttttcagctcccggaagctttctccgggaaggtggaggagttccccgcggtcataggcattctgatcgcacatgccgttaaaaacgggagtccactgccagcggcgcacgcccagatagttcttgaacgtatccaccagttccgtcgtgcagttggcggtgacggtatgataatagcgcgggcgttcatggagactgttgattttttccgcaaaccccagaaaggcctttttcaggttttccctgtcaatgttgatacggtacaggtacatgtcctctttccggtaattagtgcgcagggcgaacaggtcttcttcgtccgccaggatgtaaatcacgttgaattgcttgtaaaggccagggacacttccctgctccaccccttcaggcagccgcgtttccacggacagggccagatgcttcccatcctcaaaaccgaaggacaacatggtatgggccacgaattccatcccatcccagtggctcacggcaaaatccagcgtagccagcttgtccaggtcaaagcggcgcgtcacatagcgcgcgtcgaagtcccgctccgtccggtagataaaactgcgcacgtccttcaccacgatttcatttccgttgatttccacggagggcaggcgactccaggacggctgccattccttatcgttcgtcgccggtatgcacaggtagtacgccagcaacagggccggcactccccaggaagcgcgccataatacgggccgttttctgcggagggcgaaagcgcacgccatggccgccacgtacaaccacaccagcacgggacctccccatacgttgtaaaaaaccacgcccgccgcccatacggagaggccgaaccacgccgccatcatcagaatgcgggcggcggccaggcccgcgtggcgcaggaaagtcaaatgcatgaaaaataaaaagcaggccgcgcgttccagctcatgaaacgcgcggcccgttaacggaagttacctgaaagaaaggcctttcactttgtccgtcagggctttcagcacgcgctggtgcgctgcgtccacttccgcggccgtgagggtcttggccggatccctgtacaggaaggtgtaggcaatggatttgcggtccgccgggagtttttcaccggaggggtccgtgaacacgtcaaagcaggaataactgacaagcagtttttcccgtgcggattccacggccttgacaatgtccgcattgggcgtggagaggggcagttccatggccgcatcgcgggaagaaccggggaattggggcaattccgcagccttcacgggcgcggtgaggatttcctgcattttgcggagatccagttccgccacgtacacgggctggcccaggcccagctcccggcagcgcgccagggacaggcgggcgaaatagccgcaggctttcccgtccagctgcacatccgctcccagggcggcctgttcgcgcggtctggcaggcgtgagcgtaaaacggtggcccggagccagaacagccatcacggccagaaggtcctcaaaggaggcctgctccggcctggggtccgcccaagagcgcgccgtgcggtccccggaaaccaggatgcccagggtatccgtttcaatgtccctgcccttgccgccgcccgtattgcggaagacgcggccaagttcaaagaagcgcaggccggaaacgccctggttgctgttgcgcacggcggcggcaatcagaccgggcgtatgggcggggcgcagcacggagtgatcctcgctgagcggcagggacacgcggatgaggtcaccgtcctgaagggggcgcaggggcaaggcatccttcacctgggcgatggcgccgtccgcggattcagaggcgatgagcttgatggtctgggtttcataaaatcccagggccgccagcttgcggcgcagctccatctggaaattataggccgcatccaccggggattccgccacgaaggggccggagaagcgggacggtatgccgtccagaccgaaaacgcgcacgatttcctccagcaggtcgcacggacgcgtgaggtccaggcggtggggggggatcagccagcattcgggagactccggaacctgcttcaggcccagcgccgtcaggatgcgtgccccttcctcatgggaaatggaaccgccggaaatctgatccagcgacttccagggaagttttacaaagcccagttcattagtcaccgtggagcccttcccctgcttcagggaagcgggcacggaaacggggctgtccgcccctccgcaggaaggcatggaagcatgcgccggattaggaacgggagaaccggccacatacgttggggaggccgttccgcccgccagctgaagaatcagttccacggcgcgcacggaaccgcgcaggacattccaggcggaagtgccgcgttcaaagcggtaggaagagtcggaggacagggccagcctgcgggacgtggcgcggacggaggagggcttgaaccaggcggactccagaatgatatccgtagtggcgtccgtcacgccgctttcctccccacccatcacgccgccgatggcgagcgcgttgccggactggtccgcaacaaccagatccgtgcagttaagcgtgtattcctggccgtccaaggccttgatggtttccccttcataagcggtgcgggtgacgatgccgccctgcactttcgccgcgtcaaaggcatggaggggcgttcccagttcatgcaggacgaagttggtaatatccacgatgttgttgatggggcgcaggccgacggctaccaggcgttccttcagccattccgggctttcctgcacgttcacgccgctgatttttacggcggtgtagtacgggttcagctccggctggtccagccgcacgaagtctccggcgggttccagcgccactccggcgtcgtcaatggaaacaggcctgtacccccggccggagatagcggccagttcatacgccatgccgttgtgggaaagcaaatccggccggttgggcgtcacttccacttccaccagggtatccgccttgacaacctgggaaatcggcgtaccgggttccagttcctgagggagaatccagagaccgtgctccttgtcgggaagccccagctcggaggcggaacagagcatgccgcgggactccacgccgcgcagcttgcccaccttgatttcaacgttgccgggcagcaccgctcccggcagggcgcaggggaccttgtcccccaccttgtagttctgcgcgccgcacacaatctggtgcagcgtgccgtcgcccacgtccacctggcagactttcagccggtccgcctggggatgctgttccgcggcagccacgcgggccaccaccacgtatggggaatccacgccctgctggcggatgtcttccacctcaatgccggcaaaagtcagcatgtcagacatttcatccacgctcaggccggacaggtcaatgtactgggaaagccagttaagggaaatcttcataacgggaaaacaggtaaaaattattggaattgggcaaggaagcgcacatcattctcgatcagggcgcggatgtccctgatgccccagcggatcatcgccaggcggtccaggccgatgccgaaggcaaagccggtcagccccgtgtagcgggcctgcgctccggggtccaggcccagttcgcggtccacggcttcaaaaacattgggatccaccatgccgcagccggcaatctccacccagcggggggcctggccgtccaccttcagcttgacgtcaatttcaaagctgggttccgtgaacgggaagaaatgggggcggaagcgcacctccgttccggaaccgaaaagggcgcgcagaaaatattccagcgttcctttcaggtcgcccacggaaacgtccgtatccacatacaggccttcaagctgattgaaggcggaaaggtgcgtggcgtcaatttcgtcgcggcggtaggcggaaccgggagcgatgacacgcacgggcggcagctgcttttccatggagcggatctgcacggaagacgtgtgcgtacgcagaagcttgccggaatcaaagtaaaatgtatccttctcattgcgggccggatgatcctccggcgtgttcagcgcgtcaaagcagtggaactcgtcctcaatctccgggccgtccgccagggcaaagcccatgtggcgcagaatgcggacggcttcatcccgcacgatggtgagggggtgcagcccgccaggcggcagggagcgggccggaagcgtcagatccaccccggccacggcggccttgtccgcctgggcctgcacttcctccagcttggcgtccagggcttccgtaatggccttgcgggcctcgttaagcaactggccgacagcgggcttttcctccctgggaacattcttcatgcccgtctgggccagggttaattccccttttttgccgaggatggccacgcgcgcgtcttccacgccgcgcctgtcagacgcctgggcgatgcgtgccagggcgtcccgttggatgcgtacaatctcttccttcataaaatttgacgggcaagagcttacccgtcccccccgccagcgtcaagcccttcgggccggcggaacgtcactcaggggaaaatggcgtcatccggaaaagggggaaagaaccatggaccctgcttcccaatcactaatacttaatcatgaatatctccccagaaaattacacgtatcccggccgggcggacatgcggccggaaaccatgccgagcacgcagaacaaggtataaaccaggcagaacggcaggaaagagccaccctgatgcaggaaggaagtgaacagcaggctcaacagggcgcccatggtgaagccgattccctgggacatgccggaaagcctgattgattcggaaggcgtccgggcccgttccaccatcagcgccattccgcggctgaatacggttcccgtcgccaggccgaacagaatcgccatccagacggcccagtccagcggaaaatacaggatgccccagcaggagagggccgccaacgccatggccatcacgatgaggaggccccgccctcccatagctttttccagcacgtgagcggagagcgtagcgggcagctgggcgaacatggccacggaaaggatgaaaccggcgtcctcatagctcatgccccgctgcctcagaaagatgggaatccaggtataaaagaaataggcagccccaacgcggctcaaataaaaaacggtaacctgccatgccttgccgctgcgcagcaggctgcgtccggatgccgccggatcgttttgaaacacgccgtccggatgcctgagaaaataagcgccccataccagcatccccagcaggatgggaataatccagatccccaggccgaaacgccagcctcccagcatattggaaaggggaacggacaggccggaagccgcagcgctgcccacgccgatcatggcgctgtaaacgcccatcatggcggaagcacggtcaggaaactggtgcttgatcagtccgggaatggccgctccggcaatccccatgcccagccccatcagaaccatgccgccgtataaccccgccacgccgtcccagctgcgccagaaaattccggccaccgccagaagctggaaccagaaaatgattttccacggcgtcatccggcgcgccacgcgcggagaaatgggagccgccacccccagcacaaagacgggcagcagggcgaacagccctgaattttccagggaaagccccatatccctttcaatcgttcccaacagcggatcgggagaatcaaacccggtacgcagattaaagcacacgattaaaaaggcggcaaacaacagcatctttcccctgatgcctccggaagttcctgccttatccatcccatgttatacagcctctcccccgcccctgttcaaaagcaacagccttccggctgtcagcagtccggaagatacggtatggagaaaagaccatcaggatgagcaatccccttgcggttttccatccgccccccctgtcatgaaaaagcgccgccgtcccggagaacggcggcgcccgaacacgctaacctcttaagctttcatttgtcagggcgtctgccgtacaccagcgtacgcctgccgtcccaggaaacggcctcaatccgcgtagagccttccggataggggaccgtggtggaggaattatccctggaatccgtccccgccatggtgatgcggaccatctccctgtctttgtaggtttcaaagacgacggcgtttttccacacgtcatgggaaataatgcgacgattgacctgctccgtaacgccctggttatagacgccgcggacaggcaggcggttcttatatgcttccgcgctattgacggaaatatagtaaatgacggggctttccggctttttgtacttcctggcataggcaatcaggttcttgcagtcggcctccgtgatggtcatgcgggcgcaggtgtagtcgtccagttcctggtcaatgggcttgagcatgcccgttttccggaaaaaatccgtcaggtcctgtctggcggcgtcgcaggcgttcttcatgaacgcaagctggagctctccatccttcttgcccctggtatccatcttgatggccttataaaagatatccggataaaagtcgggattgcccttcccggctatcttgaagtacagctccagctgccacaggggagccagcttgacaaaatggtcgtgcaccatcggacggttatccccgccggaacgcttgtccggaccgctctggacaagccagttttcccccttcaaaatgccgttgttcaagtaggcgttgaagcggccgccaatcatgttgccgtccccgccgttgatgcgttcatgctccaggcgcatgctggagggattcagcatgtaattcacgtaagcggagtaaatgttattggtcacttctccggtggatacccatttcatggcggggcgcacctggttgacgtggccgaactcatgggcaatcccccaggcgctgccgggaatcttgtccggattgccgacctccttcatggtaccgttatggaacgcggcccccgtgccgtccgcatgcatgaacccgttccagatcacacggccgaacatccggtttttgggcagcatcctgtacttgtacaggcccatgatctgctgctccatgccgataatcctgtcgtacagggcaatgagctcctcccctttgtccgggcagaattgtttaagttcctccaccggatacaccagatgcacgcggttgcccacgatgtccacaacttccgtgggggagttttccagcatcctcttccagtcgctgtttttgctgacgcctcccacgaaaactccattcaccttgccggacagaatggacagatgcaccttgggcgccttcttgtaattggatgtgaaatactcaatatagccaagccccttgttcttcgccctgatgatgttgaccccctctttcagcggataggagctgtggcctccgtcccgcccgaaattgtggataaccagattcagtttttcacctttgggatcccccatgaccagcaatacgtcctccccctcttcaaaaaagatgccggtgggattttcaaatttgctgtactggctggtacgcaggcgttccgccagatccttgaccggttcatacggctccgccgtcagggcgcgggccttgcggtcaaatttcttctccgccatctgctcggcgagcccgcgcacaaagggatccttaattttggcgatgcggtcgcgcgtgacattgggcttcaatgcaagcatgtattcattggcgaacacattggaatccaatgccttcaaaccctcctccgtaatcggcgagccccctgtttcctgggcggaaagaacgccgccgcccaacacgccgcagaaggccagtaaaagaatcccctttttcaacaatggtgagaaaatcatttgttaaataatactgttcggtttccggaattgtttcaaggaaaaacgcccggcccccatgcctgtgaaaaagcctttttgtgtgacatgggacgcccgggcccagggagaaaaactgtccatcccccttgacgggggccgtataatgacgctcgcaaaacatttttccatatgaatacagaaacacatcaatttcaggcggaagtccggcagctgctggacattgtcatcaacgccctttacagcgaccgtgaaatctttgtccgcgagcttgtttccaacgcttccgacgccctggaaaaactgcgtctgaagcagctgacggattctaatatttaccagccggacaagcccctggaaatcaccgtcaccacggataaggaaaacaagaccatcaccattgcggacaccggcatcgggatgacggaagcggacctggtggaaaacctgggaaccatcgcccactccggcaccaaaaaattcatggaggccctcaagcagaagcaggaaggcggagcggacctgatcggccagttcggagtgggcttctacagctcgtttatggtggcggaccgggtggaagtgttcacccattcctgtgaaccggaagccgcctccctgcgctggtcttccgacggacgggaaggctacagcatcgaaacgctggcggaaccgctggaccggggcacccgcatcgtcattcgcctgaaagacgaatatgaagaattctcccaggaataccgcgtcaaggaactcctgcgccgttactccaacttcgtggggttccccctcaacttcaacggagaacacatcaacaccgtccaggccatctggtccaagtccaaatccgacgtgaagccggaggaatatgacgagttttaccagttcatctcccatacggatgaaaagcccctgtcctacatgcacttcagcgcggacgcccctattgccctgaatgccctgcttttcatccccaggcgcaatccggaaatgttcgggttcggccgcgtggatgccaacgtgtccctgtactgcaagcgcgtgctgattgacgccaagccggaaggcctgctgccggaatggctccgcttcctgaacggcgtggtggacagcgaagacctgcccctgaacatttcccgcgaaatgcttcaggacaattccctggtgcgcaaaatcagcgacatcatcaccaggcgcttcatcaagcatctggaaaaactggcgaaggacgatcaggaaacctacagggaattctacgcgcaattctcccgctacctgaaagaaggcgtcgtcacctcctggccgaacaaggaatccctgggcaagctgctccgttttgaatccacgtccacggaaccgggggaaacgacctcatttgaggaataccttacccgcatgaaggaagggcagacggccatttacgcgcttaccggcccttcccgctcccatctggaaaacagcccgtacctggaagccttcaaggcccgcggctatgaagtggccttcttcacggaccacggggacgaattcgtgctggactccctgtccagcgtggacggcaagcccgtcacgatgatcgaccgcgccgacgtggaactccccgccctggaagaggaacagaaagacgccctgccccaggaggaagccgcggccctggaagaatggctgaaaggactgtacccggacaaattctccaaagtcaccctgggcaagcgcctggtcagcggagccgccgtagccctgcaaagcggcaatgacatggggccggaaatgagggcgtacatgaaagccatgggtcaggaagtgccggaaagccacccgcagctggaactgaacccctccaaccctctggtgaaaaagctttccgccctgcggacggaaaacccggaactggcgcaaatggtggcggaccagatcgcgaataccgccctgctccgcgccggcatgctggacgatcccgccgtgctggcccagtcctcccaggccctgatggaacagctcctgctgaagtaggggcccggaagaaacagcttccttccccaacgccgctcccagccctccccgccgggggcggctttttcatttctcttcccgccatgaacgcgttacgccacatgccccgccatgttctattcctgaggctggcctatcaagcgggcatgtgcctgctggccctggtcgccgtaacgctgaccgccattgacctgaccacggaagcggcggaatgggaagtcacggcggaccgcaccatctactggatttttgtgctggattatgtgatccgcttctccatcagccggtccaaatggctcttcgttaaggaacacccctgggatttgctggccattattccctttgatgccctgttccgcctgttcagattcgcctcgctgggagaaatcttaaggctcgccagatatctggacctgttttcctatgccatgaggttcaccacgcgcatccggcgtttcttcaacacgaacggattcaagtatatctgcatcgccgccctggtcatcatcctgctgggggccgtaggcatccatctggcggaaggcatgagcctgcccaacggcatctggtggtccttcgtcacggctaccacggtaggctacggggatacctatccggtcaccacttcaggcaaattcctggctgtattcctgatgctcacgggcatcggattcgtgggaacgctcaccagcaccatcacttccttctttctgagtccccacggcggagaagcgctgccgtaccgggaggaggaaattgaggccatcaaaaagaaactggacgacctttcctccatgacggatgaagacatagacaccatggcggccctgctgaagaccctgcaggacgcatcctcggcacctccagcggaaaaagaggaaacgcctgatatccattccggaaaaaactgaaaagatccgtttggtattacatcggaaaagacgtcctgtccgtaccagggcaaacaccaaatactcaaccgtttttcagtgagaagctcttaagtctctatgttgattaccaactgcttggccacctttaaaaaaaagaaacgccgcaataacaatgttggccaaaggaaccagttttaaaaacacccaccatccgctctctcctatatcatgaagccttcggacatccgcaacaatattgaaatatataaaacaaataaaaataataactgtcaacaccaacattcctgcatcattccctgttttactccacatcattacaactccacaaagaagaatactagccatcattggcaatatcagcaactttagcgcccaatattcagatctggaaatacgaccggaaaaactgacatattttcttaaaaatgaagttccattcgcattctccatttttatagaagcatttccctctatctctctgcggattttatgcatatcggaagcagatacggaagacttcaaaatctcctgtacgtcagacgcattacactctattcccaactcattattcacgatgtctgcaactgctttagaactcgtttttgtcaatattgcgacgtccacaagtttattgtatgcatcaatacgggatagcctttcttccgactgttccataacttttttcattggtgatctttttataaatacagttactatgctcttcgctcttccctttacattactcccagcttcttcagcatggagatggcaacggaatttccctgttccgcagccagacgataccagcgtatcgcttcctgcctgtttttagcaactccatgcccaaaataaaaacacgcgcccaatcttctttgagcttctgcatttccttttttggctgacaaaaaataccagtttacagcttctcttttattcttcccaactccgtgtccgaaaaaataacaatcgcccagcatccactgggcttccgcgtcctcctgttcggcggccaggcggaaccacttcaccgcctcctgtttgtcctccctgattcctgttccaaaataatagcacctccccagactatactgagcttccgcgtttttctgttcggcagccaaacggaaccacttcactgcctcctgtttgtcctccctgattcctgttccaaaataataacaggctcccagcctccactgggctttcgcgttcccctgctcggcagccaaacggtaccacttcaccgcctcctgtttgtcctccctgattcctgttccaaaataatagcaactccccagcctccaccgagcttccgagtttttctgttcggcagccaggcggtaccacttcaccgcctcctgtttgtcctccctgattccttctccccaaaaataacaatctcccagtctccactgggcttccgcgttcccctgctcggcagccaaacggtaccacttcaccgcctcctgtttgtcctccctgattcctgttccaaaataatagcaactccccagcctccaccgagcttccgagtttttctgttcagcggccaaacggtaccacttcaccgcctcctgtttgtcctccctgattcctgttccaaaataatagcaactccccagcctccaccgagcttccgagtttttctgttcagcggccaaacggtaccacttcacagcctccctcttgtcttctctgattccttctccccaaaaataacaatctcccagcctccaccgagcttccgagtttttctgttcggctgccaggcggtaccacttcaccgcctcctgtttgtcctccctgattcctgttccaaaataataacaggctcccagaatcctctgggcttccgcgtccccctgttcggctgccaaacggtaccacttcaccgcctcctgtttgtcctccctgattccttctccccaaaaataacaatctccctgctgcttataacaatctaccagttctttctgggcttccgcgtccccctgatcggcggccaaacggtaccacttcaccgcctcctgcttgtcctccctgattccttctccccaaaaataacagtatcccagcctccactgggcttccgcgtccccctgatcggcagccaaacggtaccacttcaccgcctcctgtttgtcctccctgattcctgctcccaaaaaataacaatctccctgctgcttataacaatctaccagttctttctgggcttccgcgtccccctgttcggctgccagacggtaccacttcaccgcctcctgcttgtcctccctgattccttctccccaaaaataacagtttcccagcctccactgggcttccgcgtccccctgatcggcggccaggcggtaccacttcaccgcctcctgtttgtcctccctgattcctgttccaaaataataacaggctcccagccatctctgggctttcgcgtttccaaactccgccgattttttgaaacatgagacagctctctccacatctcctttattcaaatactgctcccccaaatccatcaggcgggtatgatccagttctactgtctcgttctcatgggcgtatttttttccattaaatagctgtacaacactaaaagccgttaaaaaacatacggaaatgatgattgcaatcatccgccattttcttcctgcccaccgttttttctctatctctatttccggataattatttccatccgcaaatatttgtttcatgctttttttagaacaatgaaaatctatcaggaaaaacgagaacagcagaaagacgatgatgaaagataagtaagaccacatattttcagaacagtccatcaataaaaaacctacaggaataaataaggaaaaataaacgcccgcatttaatatcatactgttatacttgcagtctcctgccatgtccgctgcacggctgtcaggaatacaggcagaagatatacagaaaacaacaattcctatatagtctccccacgtcaaatgttccactattcctttccagctttttattactgcaaaatcatacagggaaacagcaataaccagtaagcacaaagccaaagcggcttgcactgtagaaacttgagtttcccttcttgaagagaataaagacaggggcagcagggcgacggaagccgcaaaagaaaaaaccaccctggcgctcaaccctcccagcgctccaaccaaaatacttaatattgcatgaagcatactcattaacaatcaatatttataccagctttcacccatttatcctgatgattccgttatttaatattaattttattattgagaatcaaataatcaatagcgccagcggcctcccttctattcattattccctgtttgacgcgcagggacaaaacctttaccatcttgtctgcaagaaccttgtccacctttccctgttttacggcttcctgaaggcgtgacagagatgcgcgaaagacctgagcttcttcttccctggcaatttttgactgggcttcatgttccgcctggttgatgattgtcttggctttggcgctttgacgtttatcccaggcggcagctcccgccctggctttggctgaagggtcataagtgctggtaattaaatccccacgatacctgttcccatattggtctgaaacggaaatcggggttatgctggttctagttgtaggcgtttttctgcttttgaaccgttcaaacctggctctggcgcttctgtcccctttcccggaatgagtgtaatagccacccgctcttcccgtttccaaagttcgagccaaaacatgttctcccaccagaaagactgttccaaatatgattaataaggaaatagaaacattcattttttgcctgttctaacggattcccaatccgtacatttatatcgaataatgtagaaaaaaatctaacatatttttatgaatcattgtttatcatctttcatttccttttccgttcctgtttgatctttatagctgttatcatcacattttagacttgtgtacggattgggaatcctctgctacaacgttcttcatgaacataccgacttcctctttcccctccgatacggatcagacaggaatcctcctcatccgttccctgggcattcctcccatggacgctttccttcttctaaaggacctcctggacaccagccgcggaagaggcgacagaataacccgggccaaacgatgcatacggctgggaggagaggctcttgccgacagggaaacaagcgtgccgttttcccaggctgtccgcgccagcctggaagcaaggaaacaccgccggccccgcaccctgcaggaaatccgctatatggctgcccggatgatgaaaaaatgcccggaactggcaagaaaacaggtccgttccatcacgccggaagattgcgagcgttatctccgcaaaagcttttccactccccgccagcggcacaaggggcggctgatcctgagcggcatcctgaatttttccctgaagcgcgggtggtgccgcagaaacgcggcctttctggttcctccccctatcctcagggaaaaacgcatcagggccctttccctgtacgaggcaaaacggcttctccacaccgcggaacagttgttccacggagcatgcctgccggcctgcgccctgatgctgtacgcgggcatacgcccccacgaggtcaaaaggctgacctggaagaacatcaacctgaaatccggcctggtttcactggcgccctgccataccaaaacaggcgggagccgccacgtttccatccttcccgtgctgggcgccatcctcagccggacgtcttccgccggttccccctcccgtcccgtttgcccgcccaactgggaaaagaaatggatggaagtaaggcgccggtccggcatcctgaaaaaaagcggatgggtgcaggacgtgctgaggcatacctacgcctcctaccacctggcccatttctgcaatcaaaaccttcttcagaaggagatggggcactcctccccctccctgcttttggcccgttatcttaacatggacggaatcacctccgcaaccggcgccatgttctggacgcacagcttcattcctcccgctccgttaaagaaaaactgacaaaaatccgtctggaattgcgcggccaaagacggacaatcctctgcgccgggaatgtccggcgcccctctttttccaacctttccgccattttccaaccatgccagcaaccagccctccccgcgcctgggccgaaatcgaccttggggccatccgccataacctgaatgtcgtcaagcaggcggccaaaggggaatattacatgcccgtcgtgaaggcaggcgcctacggccacgggctggaacaggtttgccgcacgctggattcggaaggcatcgctttcttcggggtggccaatgtgggggaagcccggcgcatcagccaggcgggctgccgcacccgcccttacatcctgggccccgcgttcccggaggaacgggaggaaatcgtgctgaacggctggcgctccttcatttccaccatggaggaggcagagcattacaattccctggcgcggctgtacggaaagacgctgcccatccacctttccgtggatacgggaatgggccgcggcggattcctgccggaccagcttgaagaactgctttcccgcctgggagaactggacagcctgcatccggaaggcctgggagcacacctgccctgcgcggacgaggaccgggaaatcacgctcaggcaaatcgccctctttgaacggatggccgcccgcatccgggagaaactgcccttgaagtattgccacctggccaacagcgccgcctccctggattatgaaattccctccaacaacatgtgccgccccgggctggtgctgtacgggttttcccccattgactccccatgggcctctcaattaaggccggccatggctcttttttcccgcctgacggtggtgcgcacactgccggaaggccacggcatttcctacgggggcacttatgtgacggaccatcccaccagggtggcgaccgtgggcataggctatgcggacggctacctgcgttccctggcccataagggcgcccgcgtcatggtggacggggtttcctgcccccttctcgggcgcgtgacgatggatcaaatcatcgtggacgtcagccgggcgccgcacgcggaaccgggcatgaccgcagaaatcatggggccgcatatccccgtgacggaactggctgaaaaggccggcaccatttcctgggaaatttttaccggaataggcccccgggttccccgccattacaattattaaactttcaaccggggaagaagcccgtcattccgcgtggaaccttcattccctattgacgggcatccggaaatatcgtttatttaaccgatatgatgaaggtttccaccagaggacgttacgcgctgcgcctgatgattgatctcgcccatcaccgcaacgaaggctacgtttccctgaaggagatttccgccaggcaggacattaccgtacgttatctggaacagattatcgccatcctcttgaaagcgggatttgtccagagcttccggggaaaggcgggaggataccgcctttccagacatccgcgagaatacaccacggaagaaatcctgaaactgacggaaggctcccttctgcctatttcctgcacggctccccacgaaaatccgtgcccgcgggcggcaggatgcgccacgctgcctttctggcgcgggcttcagcaagtcattgagaattatttgcgccgcgtaacgctggaagatctggccgagcagcagaaggaaatcggctgcgactacggagccggcatttaatcagcggccgcgggcctgaacatttctccaccttttcccattccggcccatgtcccgttttttttacccggagcttgacatgggctttccttttcattatctatttcctagttttccgataggaatataaaaatatgagcaagaaccatcgatttgaaacacgccagatccacgtgggtcaggaaagtccggacccggccaccgatgcgcgcgccgtgcctatttacgccaccacttcctatgtcttcaaagactcggaacaggcggcggcccgttttgccctggcggagccgggcaatatttataaccgcctgatgaaccctaccgcagatgtttttgaacaacgcatcgcctccctggaaggaggggcggccgcgctggccgtctccaccggggccgccgcagtcacgtatgccatccagaacatcgcccgggccggggaccacatcgtttcttcctccaccgtatatggcggaacgtacaatctctttgccaatacgctggcggacgccggcatagaaacctcttttgtggacgcgagggacgttcagaatttttccagggccatccggaacaataccaaggccctgtacgtggaaagcctgggcaacccgaactgcgacatcgtggatatggaagcgctggcggaagtggcgcacgcccacggcatcccgctcattgtggacagcacgttcgccacgcccttcctgttccgccccctggaacacggagcggacatcgtggtgcattccgctaccaaattcatcggcggccacggcacggtgatgggcggcgtgattgtggacggcggtaaattcgactggacgcagaacgacaagttccccggcatcagcaagcccaaccccaattaccacggagccgtgttcgctgaggtatgcggcaatctggcctatatcgtcaaaatccgggccaccctgctgcgggatacgggagccaccatcagcccgttcaactccttcctgctgctccaggggctggaaacactctccctgcgggtggaacgccatgtgcagaacgccttgcgcgtagcggactatctggcctcccatccccaggtggagagggtgaaccatccctccctgccggaccatccggaccacgacctttacaagagatactacccgaacgggggcggctccatcttcacctttgaaatcaagggcggcgcggaaaaagctcgcaaattctgcgaaagcctggaactattctccctgctcgcgaacgtggcggacgtcaagtccctggtgattcatccggcctccaccacccattcccagatgacggaggaggaactgaaggcgggaggcattacgccatccaccgtgcggctttccatcgggacggaacatatcgacgatattctggaagatttggaacaaggcttccgcgccattctctaacgatttaacggcagcaacgctcttttcctacaagccatgagaatttataaaaacattacggaactgatcggcggcaccccgttgctggaactgaccaattacgaacgcaggaatggcctgaacgccacgctcctggccaagctggaatacctgaaccctgccggcagcgtgaaagaccgcattgcccaggccatgattgatgcggcggaagccgccgggaagctgaagccggattccgtcatcattgagcccaccagcggaaacacgggcatcggcctggcggcggtggccgcttcacgcgggtaccggattatattgaccatgccggagacgatgagcgtggaacgccgcaacctcctgaaagcctacggcgcggaactggtgctgacggacggcgcgctgggcatgaagggagccatcgccaaggcagaggaactggccgcgggactgcccaacagctttatccccggccagttcgccaacccgtccaacccggaagcgcatttccgcaccacaggcccggaaatctggaatgatacagaaggcaaagcggatatttttgtggcgggcgtgggtaccggaggcaccatcacaggcgtgggcaagtaccttaaatcccgtaatccggacatccggatcgtggctgtggagccgttctcctcccccgtgctgacacagggcacggccggcccccacaagattcagggcattggcgcgggcttcgtgccggaaacgctggacacctccgtgtacgacgaagtcatcgccgtcaccaatgaagacgctttttccacagggaaggaactggcgcgcacggacggcgtgctgacgggcatttcctccggagcagctctctgggccgccacacaggtggcgcggcgcccggagaatgaaggaaagaccatcgtcgtcctgctgccggacacgggggaccgctatctttccacccctctgtttacggactgattccttccattccctgccatgaaaaaattcaatctccatctctatctggtcacggatgaagcatccaaatgccgcctcagccttctggaaaccgtacggaaagcggcggacggaggagttaccatcgtgcagtaccgctccaccaatccggatgcgggaacctgttaccgggaagctttgcccatacgggatttcctggcttcccgcggtattcccttcatcgtcaacaaccgcattgacctggctctggcgctggaagcagacggcgtccacatcggccagagggatcttccggttccatccgtcagatccatgatcggcccggataaaatactgggactgtccgtctccaataaggaacagctccgcgccgtggatgcctccctggtggactacctgggcatgggccccgtcttccccaccatttccaagctgaacgcccctcccgtgctgggcgtggaaggcttcgccgctctggcttcccaatcacccctgcccgttgtcgccatcggcggcctggacgcggaacgggcccgtcaagtgcgcgccacgggaaccgcctccggaattgccgttgtctccgccatttgcggagcggagaatccggaagccgccgcacgggctcttgcctgacggacggaccgcaggaaacactggacaatcaagcacttttttacgccatgctttcatcgacagaccttgttcaagccgttaccgccgatttggaaaaaatccgggaaacggccccgctggttctctccctgaccaattccgtcgtccagcccctgacggccaatctcctgctggccataggcgccgtccccgccatgctcaacgacgcggaagaagcggtggacatgctccgcagcggaacaggcgccctgctggtcaacctgggcaccgtgacgcgcgaacagggagccgccatgcaaacggcggtgcgggaagccaaccggctgaatatcccctgggtgctggatcctgtggccgtaggggctctttccctgcgcacgcggctggcggggcaattgaaggaacaatccccccgcatcatccgcggaaacgcttctgaaatcatggccctggccggctattcctccgtcacgaaaggtccggaaagcaccagctccagcgcagacgccctgcatgcggccagggaactggccctgcacacgggggcggccgtgctcgttacggggcgtacggattattccacggacggccgccaggtaaccgccacggaaaacggccacgccatgatgtcccgggtcacgggcgtgggctgttccatgggagccctgtccgccgcctgcgccgccgtctcccccacccccctgcaggcggccgtttccacagccgtactcatgggcattgccggagaaatggcctttgaacaaagcccctcccccggttcctttgccgtatcattgctggacagcctttacgccctttctccggaagacgttgtccgcagagcgcgctttctttccctttgacagtcttctcttccccggaaagcaactccgctgccatgcacacggcctgacccggaaatctccggaaggggaagcacatcaccaggagctgcccgggagaggggaacctccggcaccctccccgctagaacaacctgcgccatattttcaggcattccgcctgcggagcagaaagcggcatgccggggacctgacgaatcccggcacagccatttgcctatgccgaccgccagagcgccggaaccgcaagcggatttagtgttgagaaatacctgcagccttttataatggaggcaacccatttcagcatggcaaactccactaccacgcaaaaactctgcaactggttcattcagcaggcgaacgccaaggggctcatcctgacgcccgtcaaactgaaccatctggtcattctggcggactggtggcatctgcaccggactggcgctttcctgatcaatgaacgggtggaagcctggccttccggtccggtactcccttccatttatcatgaatacaaggatcagccgccctactcttctatagagcatcccagccgccgccagccccctttggaggaggaaacggacattatcccctttctggagcatatctggaacgtctatggcaaatatacggcccagcagctcggacgcatcaacaccgccccgtcctccccatggaagcagtcccagggcaggcatgaacaggcgcaccgccagcaaatcacggaggagcacgtacaggcgtactttaaaagcctggccggataattccggaaaaaacagcctgccgcttacctgtacagcctttttccaatcaaaacatatctttgagtaaaaaaaaacttgcaaaaaacggcctcttccgctttaatgcgcccgcgccgcaaaagcgcccgttacatagccctatagtgtaatcggtaacacagcggattctggttccgtattttggggttcgagtcctcatagggctaccacttctaataaaaaggccatctctccggaggcggccttttatttttttctattaccggctccgcgccgggcaacaaggagacggcaaaaaaatctggaagcaaaagatgattctttgacagaacctgtttcctccccgtttatattggaaatatggcacgtcccttatccattctcggcggcattctgctctccttctcccctccggcagaggcaacagcccaatacagcattatccctgagccgtccagaacggaactcaagcaaaaaacagctaaaactttacagcttctttccgaccaggaggctccgtccctgggaacggacgcctaccggctcacagtcaccccgcagggggcgcaccttgcttccggaggaagggagggcagaatttacgggctggcaaccctccgccagctccgggaccagctggcggagcagccggagggcatcccctgcggcgtcatcacggacaaaccgcgctatccgtggcgcggcctcatggtggatcccgcgcggcattttatccccatcaaggacctggaaaaattcgtggatctcatggcctactacaaattcaacaggctgcacctgcatctgacggacaaccaaggctggaggctgcccgtgcccggctaccccaaattgaaaagcattgcatccaggcgggaggaaagcttcgaagacggaatcccccacgaaggaatatacaccaaacaggaactgaaggagctggtggcgtactgcgcagcgcgcggcattgaggtcatccctgaaatagacgtgccgggccacaaccaagccctggcggcagcctacccggaatttttctgcttccccaaaccggacatgaacgtgcggacgacagcgggaaacagcaaggaactggtctgtccccagaagccggaagtctggaaattttatgcctccgtctttaatgaactcaaggatatcttcccgtccggtatcgttcatctgggcggggacgaggcccccacggaactctgggaaaaatgccctctgtgccgggaagcccggaccagggcagccatgaaagacgaacaggaacagatgaaagccttttttgcgaaaacggcagctctgcttgccaaaaacgggcaaacgccgcaattctggtatgaggggaacgccggcatttaccatccgggggaaacggtttacgcatggcggcaaggccaggccctccagtccattgagaagacgaaaaaggcgggattgaacctgattatggcctccagcgaatactgttacctggattttccccagattcaggggcagcgcaactggggatggatgaaaaccaccaccctgcaaaaatgttatgacctggatcccgcttttggaaaaccggagaaggaggcaggccatatccggggcgtgcatgcccccgtatgggcggaacgcctgccggacttgaaccacttgctttaccgcgcctatccccgcgcctgcgccattgcggaagccggctggtcaccgatgggcgtgcgctcctgggaaaacttccggcgcaagctggccgaccaccgtcaattcatcctcaaacgcttcaattatgatatggagcgcactcaggggaatgaaccggccttccgctgggaaaacaacaagtaatttcaccgtttttccttatcacgcatcccttaccatggtagaatcttttccgaaacagttcttcatgatgtttaaactgcccctcatcctggcctgcgccattttttccgcccacatggcatgtgccgccgcaacggacaaatacagcgttatccctgaaccggaaaaaacggagctgcagcacaacagtaccggaaccttgaaacttctttccgaccaggaagttccgaccctgggaacggacgcctaccggctcacagtcaccccgcagggggcgcaccttgcttccggaggaagggaaggcagaatttacgggctggcaaccctccgccagctccgggaccagctggcgggacagccggagggtatcccctgcggcgtcatcacggacaagccgcgctatccgtggcgcggcctcatggtggatcccgcgcggcatttcatccccgcggccgatctgaaaaaatttgtggatatgatggcctattacaaattcaacaagctccagatccacttgacggacgaccaagggtggcgtcttccggtgcccggctaccccaaattgaaaagcatctcctccaaacggaaagaaagcatgcgcaacggaattccccacgaagggatgtacaccaaacaggaactgaaggagctggtggcgtactgcgcagcgcgcggcattgaggtcatccctgaaatagacgtgccgggccacaaccaggccctggcggcagcctaccctgaattcttctgcttcccgaacccggatacgaaagtgaagaccgatgaaggtgtcaccctccacctcatctgcccgcacaaaccggaagtctggaaattttatgccgctgttttcaaagaactcaaagatatttttccgtccggcatcgtccatctgggcggggatgaagcacccctggaaaaaacctgggccaaatgccccctcagcatccagtaccgggagcaaaaaggcatgaaggacgtccacgaggaattgaaggaattcatcaaaaaaatgtcctccttgctggctgttcacggcaagcgcatccaactatggtatgaaaagccgtgggccagggccaacatctacaacaaaggagacaccgtcttcacctggcgcatgggactgactccgtccaccatcacggagacgaaaaagcaggggctctccctgatcattgctgctggggaacactgctacctggactatccgcaacttccagggcaaaacaaccggggatggatgcccaccaccacgctggagcaaagctacaggctggaccccgcctacggcagaccagaaaaggaaacaaaccatatcatcggcgttcagggcaccgtgtggggagaacatctcccttccctgaaccacattctctaccgcgcctatccgcgtgcctgcgccattgcggaatccggctggtcaccgatgagcgtgcgctcctgggaaaacttccggcgcaagctggccgaccaccgtcaattcatcctcaaacgcttcaattatgatatggagcgcaccaaagaaaacgaaccgcctttcaaataatccgccctctctttttccatgagcaacatcaaatttgcacgtccgcaccgcccttccgtagaagaactggcccagggagtactggccggaaaccgcgccctgctgggaagggccattacactgatagaaagcaatgccgtccgggaccaggaatcttcccgcgccctcatctccaggctcctgccccattctggcaacgccgtccgcatcggcattacgggcgttccgggcgccgggaaatcctctttcattgaagccttcggcacttacctgtgcaaaaaagggttcaaggtggctgtgctggctattgacccgtcttcttcagtctcccgcggttccattatgggagacaaaacacgcatggaggaactctccggagaggaaaacgccttcatccgcccttccccctccggcggctctttgggcggcgtagcccggaaaacgcgtgaaaccatgattgcatgcgaagctgcgggctttgacattattctcattgaaaccgtgggagtcggccagtcggaaactacggtgcgctccatggtggacattttcatgctcctgctcatcaccggagccggggacgatctccagggcatcaagcggggcatcatggaactggcggatatcctggtagttaccaaagatgacggcgacaaccgccagcgcgccgcagcccactgccaggaactgaaaatggtactccactacctgcaaagccccactcccggctggacgccctccgtcctcacctgttcctccctggagggacgcggcctggacaccattgaagagacgctcttccgcttccgggacagcatgaaggaatccggattctggtacagccgccgccggagccagtccctttcatgggtccagtccctggtgcatgaagccctgctcaccgcttttgaacagcaccccgccgtagcgtcccgcatgcccattctggaaaacatggtggcgggggacaaaatggaccccgtttccgccgcacatgacctgctgagccacttcacttatcccgcgcccggacattaaagaaatcttccagcaccccggcgtaaactttctttttaaactccggcagccactccagcttaaattcggctggggctatccacttgtagtcgcaaaactcccggtcatccaggacgggttccggagcgtccgcatgcagccggcacaggaagtactcctgctcctgcccaacaaaaggctgccgccgcttttcacggacatactccagcacctccggcggataatcgtaacgataccctttttgggattccacaatatcatactgggacggtaaaaaccccacttcctctccaatctcgcgccgcacggcttccaaagccgtttcccccggatcaattcctccctggggaaactgccaggcccctttctgcccggaacgctcgcaaatcaacaatttcccgtcctgccggaccatcatccccgcaacattcggacgatacaatctttccatgccctgttcattaacataaccttttccgcatttccagccatgttctttccataaccccgttgaaaacgggcaaaaaatccttttacagatttttcccctctacttcaaggcactccgaataccaacccctttccaccagaagaataagcggtataaaaaaatgaaaaacttcccgtttgctgcgggaattccggccaatcagctaaaaactttagtaatcagatattaacatactgccatttttcgaacattgttctttattggcaagtctattgttcctgcaaagtaaaatatgggaaccggccttccttttacttttcacgcgttccgttaataaaactccgatcatgaaaacaaaaatgaactatttgacagccacgcttctggcaatatttgcatggggcggtacaggcgtcggtatggcaaaacaatccaaaaaggcgctaaggcatcccgttgaagacaacaaaaaatctcccggagtttacgatgcgaatcaaaatgaccgtcaaggcattcaagatgcggaacaaggccccggggacaaaccgggtacgtggagcatttcccgtcccaacgccaaaaacgcgctgtctgaagtcacaaaaggaatttaccagattcacggcggaggttttccgaacataactattattgaaggacgggaaggcatcatgatcattgcccctttcgtcccgaaagaaaccatggccgagagtcttgacctctattaccggaaggcgggaaaacggccaatcaaggctgttgtagatgcacatccccataccaactattttgccagtaccaaaagaacggcatccgggctggacatagacggcatagaaatggaattcatggcggttcccggaatgggggcctcttctgccgcactgatgtattttccccaattcaaggcgcttttttatggagaggacacggcaagcgccatacatgatatctgcactctgggagtatccaaaataagggatgcaaaaaacaggtggaaagcccttgatcaagccattcagcgttatgaagacaaaatagagattttgttctcacaacaccattggcccagaataggaaaagaaaatatcaaacggttcctggccagggaatgccgcaactgcaaatacatgcatgaccggatattgaacctggttagcaaagggtattcccccgcagaaattgaggaaaaaatcaatccgattccggaaagcggcagaatcaggaatagccctccggaaatcaccgggcaaaaggactatcgtcaagacgccgggacattaaggaacgttatgtctgcccatctaaaaagaggaaacataaggaatctggtaagaaatatgttgaaacagttcggttatcaaacggaatccgtattccggaacgatgaacttctcgtcaatgccggagaaccgggaatcgggctgcttaaaaactcccgcgaactcacgttgacggacactttatatgccctgactccggaactgctgttcgactatttgggcgtcagcctgaatagtgagaaatccaaagggaaaaaactggctttcaactggattgcccaaaacggaagatcatacggcttctggattgaaaacgaagtgctgatgtaccgcgaaggaaaactggtcaaacatcccgacgcagtcatcaccggagacaggctccacttcgccctggtcgccatgcgggcaatgcccttaaagacagctctggacaaaggcatgattaaaattgaaggcaatacggataaattcagggaattgctcggatgcatggataagttccatggaaatttccatgccataacaccctgattccattacctttttacgtacgtttcaggtttttcatccggaaacaggagtattggcattttctatcaatatcatgaactgtgcctgtaaatattattcaaacaagtcatgtattccggcgcaagggagcaactaaaaaaagggacgacatttatcgatggacagacatgttctcccccgcaaacattcaacgatttttccttcccatacagtaagagctgatattaaatagaaagcatgaaacgattcttcctttctgttttagctctatttgtttgtgcagccgcacctctttccgcccagtccaagaaaggagccgccgtcccgtccacggatgactacaaccaaagccagttctggataggcaattttccggagggacagtatgtggtgcatctcagccggattgtagcggtggcgcagcacaagtatattctggacaatacctgcatggtgtatgaagtaacgctgattaccctgggtaatacgcccaccaagttttattatctggaaacgctgggtcaaaattccggtatcaacgccatcaggaatgtgactgaccgtgcgaaggagcttggggccggcgccgtcaaccgggcaacgggaggcagcattgacccggatacaaccgttgcgaaagcttacccgaatacgaataccgtggaattccgtgtagctaccctggaacagctcaataaaatgtatgcttccctgctcaaggcgtggcaggacgggaaagggaggacgttcaagccctgacggcttgaatcagtgattagagaacagcgccgggcagtcaaatttcaattcgcgggctgcaagtgcggtttttacgctcatctctcatcactgctaaatgtatttcctctccatcatgtgggccttcaaagggtccgcagagaagaggtgggtgaggccgatcgccagggcgtcggcggcatcggattccggcgtttcccggagttccaaaagagcccgcaccatgaaggcgacctgcgttttttgagcggccccgcgccctacgacggagagcttcacgcttttgggggaatattccataatacgcagcccggcttccgccgcggcaatgaccacggccgccttggccgcacccatcgtgatggccgtctgatgagactggacatagatgatgcgctccaccgccatttcatccgggttccatttgtcaatgagattgcccaaatgctgcttgatggcaagcaggcagccggactgggacacgctccggggaatggatagcgttccatagtccagggcgcgcgcgcgccggtaatccccctccaccacggcataacccgtgttgcggatggccgggtctatggcaagaatgcgcatgggatgattttcattccatcagagagaaacatcatgtttcccccctccttagcgcctgcggcgcttgggacctgcgggtttgggcttgcggacggatttgacgggcttgtcttccaacagggcggtgtacgtgtagttgaacccgtccagttttttgcgttcaatgggtttcccaatgaaattttccacagccgcagcaaaatccagctcatccgccgtcatgatcgtgaacgcatccccggaagcttccgcgcggccggtacggccgatgcggtgcacatagtcttccgcgttttccggaacgcggtagttgatgacgtgggtcacgccgctgatgtcaatgccgcgcgccgccacatccgtagccaccagaatatcgtattttccgctcttgaatcccttaagcgcctccatgcgttccttctggggaatgtcggagtgcatgacggccacctccccgcggtagccatgatgcttgagcatgccgcataccgcgtccgcctccttgcgggtgcgggtgaaaatcatgacggaacggaagtccgtccccttgagcagggccaacagcagttcatcccgctggtccagagctaccggataaaaggcatggctgatggtggcggccacttcacgccgggcgatggtaacttccgcagggtccgtcaggcaccatttggcaaatcccgcgatgaccggaggcatggtggcggagaagaagagggtttgccttccttcccacggacaaaggttgacgattttacggacaatgggcaggaaccccatgtccagcattcggtccacttcatccagaaccagggccttgacttctccgaagcgcatggtgcagcggtagaagtggtccaccagccggccgggagtggccacaacgatgtccgccccttttttcaggtcttccgtctgctttccgtaccccacgccgccatacagcaacgctactttcaacccggtgaattcaccgtattcggcaaaggattccgccacctggtcggccagttccctggtgggttccagcaccagtatctgaggtttgccgatgggccgaatccttgtcagcagcgggagggcgaaagcagcggttttccccgtccccgtctgggaggccccaatgaggtccctgccttccagaatgatgggaatggcctgctcctgaatgggggtgggatgttcataaccgcatttctccaccgccttcaagacgggttccgataaacctaattctgaaaataacattgatcttgtatgcttgctaaagagtagaacacgattccgtacagcggcgcgggaatcgcggtcaggagatgaacggattggtcagcagttcgtttttcacgttggtatatggaccgtggcccgggaaaatcatggtcgtggcgggctggttgagcactttcttttcaatgccctgtttcagcaggcgcaggtttcctcccgggagatccgtccgcccgatggagccggcaaaaatgacgtcacctgtgaacatgattccttcatccggcaaatcgtaaacaatgctgtccggagaatggccgggcacctggtggagatgccacaacaggccgccccaattcgccgtgtgaatgtccggagtaagtatttcatccaccacaaacggctgaacattgaggggaagcccccaggcgtcgcgggccattttttccagcgtcaggctttcattgtaaggctgcccggcatgaatgcggcagtcgaaaatctgtcgcatgcggcaggcatcctccacatggtcaaaatgctggtgggtgatgagaagatccgtgatgatgatatcgggctttttggaataaatccagtccgcgaagccggacggagcgtccaccgccacgtaagcgttatccctcgtcttaaagaggtaaccattacaggaagcaactccacccgtataaacgcgaatccgatccatgggcagggattgtagtgagatcgcccggaatatccagtataaagacggttcccttaaatagctttctgtcatcttcccctggaaaagccccttatatcagtctccagggaatggtgcatccggcatccatcggcaccactttctgtccatgcccttcataagcgtccggcaccagcatttcacgccgctgcagacggaccgtcctggcaggcggattcaacccgtacaaagcgcaggcatgaccggaaacaaagccctgcaaccggtccagggccccgtgttcgtcaaacagggccgccagacgaggaagagcgatgggggcggtaaatacgccggcggcgcatccgcacgcttccttggcatggatgggatggggggcggagtcactgccgaacatgaggcggggatgcccggaaagggcagcctgcaacagggcttcccggtcttccggccttttggcgatcggcttgcagaacagatgcggcctcagcatgccaccggccacatcgtccaaagtaatgagaagatgctggagggttaccgtggcggccaggttttcaaattcgtccagcagctgcacggcggcggccgtggtaatatgttccatgcagatagtcagccgggggaagcgcgtggccaaatcacggtaaacatccaggaattcggcctcccggtccatcacgaagccgtggctttcgccatgcaccagcaaaggaatatccatttcctgcatgatggacagggtagcttccgcatctttcatggccttcacgccgccttcgctgttcgtggtggctcctgccgggtacagcttgatgccgaacaccagttccttgatccgggacaattccttttctgaataggagcggaaaaatgccgtcatgtacggctggaatacatcgtctccgcaagcgtccagcacctgctgccggtaagcctgcaccgcacccgcatcagccaccggaggcaccaggttgggcatgatgaccgccccggcaaaagaggcggaacttaacggagcgaccagcttcatcatatcgccgtccctcaggtgaagatgcatgtccaacggggagtgcagttccagaatcatgccgacatcatgagggaagattgcgcccaaatcaagcacgctcccctgccctgcaggaaagcaattctccgacggtaagggaaaacgggcattttcccgcaaaccggaagggatgcggtacgctttgctgctgttgctacaaagcaaaatcgccgggaaacgaatcgtaaaagcaaattctgtcccaatgcctcagaaaaacgctgttctcccggacggctttcttgaaacagcagacggaatgcaggaacagtaaaagtccgaatgcaaaaaagccgcccggaggcggctgtttttcctgaacaaggtggcgaagcggacggggctcgaacccgcgacctccagcgtgacaggctggcgctctaaccgaactgagctaccgctccataaccttggatgccgtccctgccttgcggcggggacgtggaggcttatacacgcctttataccccggtgacaagaaaaaaagactttttttgcaacttctgcaaccgtcggcggtttgtacggtgaagaaaccgtaacttttcagttacccgatttatttcaatacagcaataacttctcaactttatttgttttagtttgacaacaattaaccggttttgacataacacccccatgcttcagactgccgcggatatcacagcctccgttcacaaattcgagacgatccttcaccagttcaaaagggataacctgaatgaggtggaccagagccattaccagaaaatcatggggctttccgtccggcagatgaacgccctgggtgccctgaaccacctgatgaccaaccgccaggaaggcattcccctgaaagagcttgcccattatctccgcatgagcattccctccacctccctgctggtggacagcatggtgaagaaaggcctgttcgaccgcaaggagaatccccgcgacaggcgttccctgtgcatccgcctttccgaggaaggcgaatccaggttccaaatgcttttcaacggcatgaaggaaaaactggataccctgttcagcactctgtcgcaagaggacaaggagaatttctgccgtattgtggataccctttacaatcacgtttacagtaaataataccatatgaaaaaacacacgcatcatcggaaggcgcccctccgtctgctggccggctccggcctgcttttttccctgtttgttccgggttattcccagggaacgccgggaggggctgcagccaaacccagtaccgtactcgtccaaaaagccgccgctattgacagtgcggtgaacaagaagtacatcggccaggtggaagccattgaccgggtgactgtgcagccccgcgtctccggcaacatcgtagccacccgtttccgggaaggaaaagtcgtgaagaagggggatctcctgttcgaaattgaggatacgcgctacagggcggctgtggaggaagcgatagccaaaaaggcccagcttgaagccaaactgctttacgcaaaaaacagttttgaacgctataacaggctgctggcctccaaatccgtctccatggacacggtggaaaacgccaagagcaccatgcatgccctggaagcggaaatccagtccgcaaacgccgccattacggtagcgaaggacgatcttaactataccaggctcacggcacccatcacgggccgcacaggccgcgtcactttttccacgggcaattacattacccccacctccggttccctggtgaccattacaggcatcgatgaagtgtacgtgaagttccctatcagtgaacgcgatttcctttccctgttcggcacccaggaaaatatgaagaaagacgctcttgtgtccgtcaacctcgccaacggcaaggcatacgaccagccgggcagaattttcatgacggacaataccgtccagacgaccacggacaccctgaacgtctgggcaaaattccccaatccggaagacgtgctgacgcccggcggcgtagtcacggttaatctttccaagaaaaatgtggaccgcttcccggcggccaacatttcctccgtgatgcacgatgcctacaagagctacgtttacatcgtcaacgaccagggcgtcgtggaacgccgggacgttacgctgggcaacacggtcaataatgaacagtgtttcagttccggcgtcaaggaaggggaagtcgtcatcatcgacggcatgcacaaggtgcgtcccggcgccaaggtgaatccggtatattccgttcaaaactgagctacccatgattgcggacctgtttatcaaacgccccaaattcgccatcgtcatcgctatcctgatgatgctggcgggcggcatctgcctgaaccagctccccattgcggagtatccggaaatcgcgcccaccagcatcaacgtgcaggctacctatacgggcgccagcgcccaagtggtgatggaaacgctggcttcccccattgaggaagaactcaacgggttggaaaacctgctctatttctcctccaaatcggataacaccggcgggtattccctgtccctgacgttcaagagcggcacgaattcggacatcaacatggtgaacgttcagaacgccttgaaacgggtggaatacaaacttcccaaggaggtgacggaccagggcatcaagatcaggaaacgctcctctgacatcctgggattcttcgccttccggtccaccagcatgagttccctggagctgaacaacttcgtcaagaccagggtgaaggatgaggtcgcccgcgtaccgggaatctctgccgtcaacctgatgccggaaaagaattacagcatgcgcatctggctggacgccctgcgcatgtccgccctgaatatcacgccggatgacgtttccaacgccatcaaggcgcagaacgttcaggccgcggccggctccatcggctcggaaggggaaaacaacttcatccaatataaggtaaacgtcaccggacgactgcagaccgtggaggaattcagcaagattatcgtccgcacgggccaggacggccacgttacccggctggatgacattgcccgcattgagctgggcgcggaaacctacacgggcagcagccgcaacaacggggaagactccgtgaacatggcagtgtaccgcctggatgacgccaatgccctggaagccatgaacggcgtgaaagacacgctggagaagctggaaaaacgttttccggaaggtgtgagctacgtcgtgagctacgaccccacgcaatacatttccgccaccatggcggaaatcgtggaaacgcttgtcatcgccctgattctggtggtgggcatcacgtacctgttcctgcaggactggcgcgccacgctcattccggcgctcgccattcccgtctccctgataggaaccttcgccatcctgctgcccctgggcttttccatcaatgtgctgaccatgttcggccttattctggtaatcgggtccctggtggacgacggcatcatcgtggtggaaaatacgatgcgcattctggagacggaggatctctcgccggaagaagccaccaggaagagcatgcaccagattacaggcgccatcatcgccaccacgctggtgacggtagccatttacgtgcccatcgccttcttcggcggcatggtggggaacatttacatgcaattctccgtaaccatgtgcgtggccctctgcctttccgcaatcaattccctgacgctcagccccgcgctgtgcgttctgctgctgaaaaggaagcaaaagaaacagagcaggttcagcctcttccgccccttcaacgcctctctggaatgggcgcgcaaaagctatatcaaatgcgccggcatcatggtgcgccgcgcgtggcttacgctgattctgctggccgctgtcctggtcggcaactggaaactgtttgagaccgtacccaaatccttcctcccgccggaagacaagggcaccgttttctgtgatatccagctggccccgggcgccacgctgggccgtacggaacaggccatgcgcagtgcggaacagaagctgatgagcatccccggcgtgcgccaggtttcctccacttccggattcagcttcatgggcggcaacggagaaaacctgggcatgtgcatcgcccagcttgacccctgggacaaacgcaagacgccggagctctccctggattccatcatgcagaaagcttccgttctgtgtgatgaaattccggcggccaaggccaccgtgttcagcccgcccgccatcatggggctgggcctgacgggtggcgtctccttcatgctccaggccagcggggaggaaactcccaaagacctggaacgagtgaccaacgacctgctggacaaaatcaacaaactgccgggaaccatgtacgcccgcagcgcgtatgaggcgaacaccccccagcttttcctgaacatcgaccgtgaaaaggctcagagcatgcacgtgcccgtcagccgcatcttcacgacgcttcaaagcaagctggcctccatgtacatcaatgatttcaacctgatcggctacacgttcaaggtgaagatgcagtctgcggcagaggaccgcaccaccatcaatgacatcatgaacacctacattcagaacgatcagggccagatggtgccgctcagctccgtagccaccctgtcttacatggtggggccgcggcaaatatcccgtttcaaccagctcatgtccgcagaagtgaccgcccaggcaaaacccggcgtcagcagcggcgagctgatgaaccagattgaggctattccgctgccggaaaattactccatcacctggacggacatgagctatcaggaacggcagaacgatgggaaaatcgtcctgctgatgggtatggccctgctcttcggctacctgttcctggtggcgcaatatgaaagctggacggttcccatttccgtcattgtctccgtctccgtcgccctgttgggcgctttgctcggcctgattatctgcaacacgcctctaagcatttacgctcagctcggcctggtgatgctggtgggcctggccgggaaaaacgctattctgatggtggagttctccaagatggagcgggagcgcggcgttcccatccaggaagccgccctggaaggggccaggcagcgcttccgcgccgtgatgatgacggccatttccttcatcatcggggtattccccatggttatcgcctccggagcgggagcggcaagccgcaaagccattggcatctccaccttctacggcatgattctcgctacagtggtgggcattctgttcattccggccctgtacgccatgttccagcgttaccgcgaatgggtgaaaggcctgtttgccggaaaggcggaataaatgtaaaggaaaactgctccatgaaggacggggcggccctggccgctccgtctttttcttttttatgcttcagcgcctcccgcggagttacggacaagagcggctatttgacctgctcgtacaaatacaggtcaaaatcttcaaaatgttccttcaggacggcacgctccagccggttctcaaatggaggaagaaaagtatccgccggatattccccctttactttggaaacccacatgcgggacatggccggcatcatcagggaaaaaatctccgcacccccgatcaccatgatttccgggtccatcaattccagacattccaactcccctgcggaatgaaccacctgaacgccttccgccgtccacgccgggtcacgggtcagcacgatgttctgcctgccgggaagaggcctgcctatgctctcatacgttttccggcccatcagcacggggtgccccgtcgtaatgcgcttgaacgtcttgaggtcgtccggcaaatgccaggggagcgccccccggtaaccaatgccgcggtcgggagccatggcgaccactcctgtataagtaacgggttgtgacatgatggattaagggatgaatgttctaaacggagatgggagccttgatgtgcggcaggggatcataccccacgagctcaaaatcttcataatggaatccgtcaatggtttttacctccggattgagcttcatgaccgggagaggacggggcgtgcgggagagttgttccctcgcttggtccagatggttccggtacaggtgcagatccccgaacgtatggatgaattcccgggcttcatacccgcatacctgggcggtcataagcagcagcagcgcataggaagcaatgttgaagggaacccccagaaaaagatccgcgctgcgctggtaaagctggagggaaaggccgtgcttttcttctcccggctgggcgggaatcacgcaaaactggaacagggaatggcacggagggagggccatgtcatccaccagggccacattccacgcactgacgatgtgcctccgagaccatggattgtgtttcaggccgtcaaccagtctggcaatctggtcaatgggtttgccgtcgtttcccggccagcagcgccactgcgcgccgtacacgggccccagatctccgttttcgtcggcccattcatcccagatgctgacgccgttgtctttcaaaaacttgatattggtctctcctttcaggaaccagagcagctcataaatgatggagcgtaaatgaagcttcttggtggtaagacatggaaaaccgtcgcgcaaatcatacctgctctgccgcccgaacacgccgatggtgcccgttccggtacggtcctcccgccctgccccattgctcaggacatcctccaaaagtgccaaatactgcttcattcccttaaattacgcttttctaatccctggacccgtgataatacgagcatgcgccaccttagtatcatctcctgctccaaaagccagccttttcacttctccccgccgttttcatcccccgcatcttttccggttttccgttccatgatcattcctgaagagccatatttgggatttgccgccttttgccacattgcaggcgccttctgcctgattccggccctgctccatacgcgcacgcctcagggaacaatcgcgtggctcatttccctgctggcatttccatatattgccgtccccttttacctgatcctgggacgccggagattcagcggatatgtggaaacgcgccgccgccagacggaccccgaatccgcatggggggaactgacggataaaattacaaattgcatggttccgtatgccgtacagtcatccaacacggcgggaaaaatcatgcgcacgctttccaatatcgtgcggctgcccgtctgccgcggcaattcctgccgcctgcttattgacgcggccaatgctttcccgcgcatctacgacgccatcaagaacgcagagcattacatcctgattgaattcttcatcatcaaaaatgattccgtggggcagaacctgaaggacctgctgattgaacgggccagggccggcatccgcatttacatgctgtatgatgaaatcggctcccacaagctcccgcccggttacatttccgccctgcggaaggcaggagtgaacattgagcctttcaacgggaaacgccatttcctgagcaacatcctgcggctgaacttccgcaaccaccggaaactggtggtggtggacggctccaccgcctttatcggaggcatgaatataggaagggaatacctgggcaaaggcgctctgggctactggcgcgacacgtttgttcagcttgaggggccttccgtccagcaaacgcaaatcagctttctggaggactggaactgggccatgctgaaatgcggcccctcttcccttccccgcctccgctgggaaatcacgccccagccggaggatgaaaccctgctcatcctgccctccggtcccgcagacgtcattcccgcctggaaaaccgcgctcatcgccctggcgaacagcgccacccgccggctctggatcgccacgccctacttcgtcccggacgagggggtcatggccgccctgcaggcggcggctctgcggaatgtggacgtgcgcatcctgcgcccggagcgggcggaccatattctggtgaaactgtcctcctttactttccttcgggacctggacacatacggcatccagctctgggcctatcaaaaggggttcctgcatcagaaagtggttctgatggacgatgacatagccaccgtgggaaccgccaatctggacaaccgttccctggccctgaactttgaaatcaccgccgttatccattccccctccgcctgcgcggaggtgaaagccatgctggagcgggatttttcctcatccaaaagggaatccctggcggattacaacaacaaatccctgggcttcaaaatgctctgcaacctggcgcgcctgacggcccccgtccagtagttcttccggggaatccgctcttgtatgcttgacctgcaagggaggctgtgagaaaatcattctccagaagccacctcttcaatttttaacaacagttaactaaataatgaatcctgttacattcaactgcaccgttctgcgcgacgggcatcaatccctggcggcaacccgcatgaagacggcagacatgctgcccattgcccccattctggactccatgggcttcagcgccctggaaacctggggcggcgccaccatcgacgccggactgcgcttcttgaaagaatggcctttcgaccggctggacgccctgaaaaaagcagccccaaaaacgccgcacatgatgctgctgcgcggccagaatatcgtgggctacaccaactatgcggacgacgtggtggaagcctttgtcgccatgagcgccaagcacggcatgaacatcttccgcattttcgactgcgtgaacgacccgcgcaacatggaaacctccatccgcgccgccaagaaagccggagcgcaggcccacggcaccatctgctacacgacttctcccgtgcacaccacgcagacttttgtggacatggggcgggaactggcggacatgggggcggacgccatcgtcatcaaggatatggccggcctcattcctccgtatgtcacccaggaactcgtcagcgccctgaaaaaggacctgaacatccccgtctggatccacacgcatgacaccgccggcctcggcgcctccacctacctcagcgccattgatgccggagtggacgcgtgcgatgtctccatctcccccttcgccaacggcacgggccagccggactgcctgcgcatgcttgccctgctgaacggcaatccccgcaagccggattacgacgcggacaagctcattgaagtctccgaaatgctcaaacccgtctatgacagcctgggcaaattcgcctcccaccgcaacgaagtggtggactccgacacgctccgctaccaggtgcccggcggcatgctttccaacttccgcacccagctcaaggaacagggcatggaagacaaatttgaggaagtattcgcggaaattccggtagtccgcaaggccctgggctggattccgctggtgacccccacctcccagatcgtaggcgtgcaggcgatgctgaacgtcaagttcggccgctggaagaacatcaccccccaggcggcggatattgccctgggctactacggccgcacctcggcccccgtggacccggaagtgcagaaactctgcgcggaaaagatgggcaaggaaccgatcacctgccgcccggcggacctgatcaagcccggcatggaagacctgcgcaggaagcttgcggaaaaggggctccccacggacgacgaacactgcgtcatctacgccatgttcccgcagcaggtggaagacttctacaaaaaaccggaacctaaggaagaagcccccgtgcaggtgaacaccgctcccgccgcggctccggcggccgcgccgtccatgaccgtcattgacaacggcatcaccgcccgggtaagcggcccctccggttcccgtgacctgaccatcgtcatcaacggccagtcccactccgtgaaagtggaacgcatcggctaaaatctccggtgcgccggcttaaaccgcttgcgggcggtcccttccatgagagggaccgcccgctttgcatgaacgctcctgcttcttattcaaccactctgttttcccacagataggggggacttacgccgccaaccagaaagcacgggcatcctgccttctgatttcatccatattcagatatctggttttcaataaatgggcgttttggtgccccatctcccattgcaattcggcataatcccggaattccagcgcgtggtaactggcaaaagtgtgccttaacacatcctgcacccatggccggctgttattccagccggcacgggcgcgcaccagccgccacttgcgttcccatcctgccgggcacaacggttcttccccggaatgatgccggaaagcccgcaaataccgcaacgccgccggccgaagggtcacccgccgcgcccctcccgtcttggaatgccgcgccggaatgagcgccgctttttcttccagcctgatatgccggaattggagccttctgacctcctgcggacgcactccggcatacagcatcagcacggctgccggcagacactcgccgccgtacacctcccgcgccgccgtcatcagcttccggcactcctccggcgtcagcacaggcacccttctttccttcaccagcgggcacggcgtctccgctgccgggttcttccccgcccatcctctgcggcaggcaaaagcgcatattccgtgcagaatgacgcgcgccttgcgccgtccgctggccgtcgggaatatattcaggatgcgctggcaatcctcccgcctcaggccccgcatcatcttatgcctcaattccggccatgacttcaccatccgcgccgtaacgcaccggatttcttccagcgtgcgtcgccgccgatgcgcccgggctttcagggactccgccacgcaaacggaaaaactgaccgtctttttcatcgctttccattccttaatccccagctccacgcattgcagccgcccggccatcccggccgacactccccggagcaaccgcgccatgaccatcatttccgcggcctgcacgcgttttttacgcatccagcaaatgagcaaggcctcttcttccgtcaattcctgttgagtcatgaagcaaagataagcaaacggattcctaatcagcatcaagtctaaaacggaaagaactgaaaaataataaggaaatacgtgcataaatgggaatttgatactttcacccgcagatatggaaattttactttccctcattttattactgtaaaaacacttaaaaaacatggataggactcttgctgattaggaatcagcctattttccccaagtgggttccttatcgtcagagttatctcaaattaaatcccgtaaacgggtagcggaacacggagaagtattcacccctgactggctggtgaatgacatgctcaacctggtggcgcatgaagcggaacgcattgacagccgctttctggaaccggcgtgcggagaaggcgcctttctggcccctatcctgttgaggaagctggcaaccgtccgccggcaatacggcagttccccggcggattatgaattccgcgccgtgctggctctcatgtctatctatggggtggaactgctggcggataacgtccgcgcctgccgggcacgcctgctgaccctgtggttggcggaatatgaacggcgtttaaaacgtccgccctccgcggaatgccagaaaaccgtccactttgtcctggaacgcaatattcttaacggcaacgctttgagtatgaaaaaagtagatgcttccgcccaggatactcaggagcctatcctcttttccgaatggtccgccgtgggcggaaccctcatcaaacgccgggatttccaccaggatgaactcctgcgtgatcaaagcgcccggacttccctggaacaggcggaaggggaactttccctgcaatacgttcccaaatctccgacgcgggaattccctcccatggattaccgcaaactgccggaagcggaatcatgaacaataacatccataaccctgacgtattgagctgtctggccaatctttccagtgacgaggtgttcacgccgccggagattgccaacgccatgctggatctgctcccgcaggagcttttttccgacccttccgttacctttctggacccctgctgcaagagtggcgtctttctgagggagattgccaaaaggctcaacaaggggctggaagctcacctcccaaatcgggaggagcgcttggaacacattttcagaaatcagctcttcggcatcgccattacggagctgacgtccctcctcgcccgccgcggagtgtactgctccaaataccccaatgggccttactccgtcgttcgttttgacaatgccgagggcaacatccgctacaaacacatcacacatacttggaagagcggcaaatgcgtcttttgcggcgcctctcaagccgcctatggagaacaggcacgacaagagggactggaaagccacgcttacgaattcatccacgccaacaatccgaataacctgtttcctatgaactttgatgtcatcatcggcaatcccccttatcaacttgatgatggaggcaacggagcaagtgctaaaccattatatcatttatttgttgaacaatccaaaaagctaaatccacgatacataagcatgattataccagcaagatggtattcaggaggtaaaggattagattctttccggttctccatgcttaatgatgaacgcatcagcaaactcattgattatacgagttcagaagactgtttccccggtgtagatatagcggggggcatttgttatttcctttgggaaagagaatactctgggccatgcaactacactaataatctcaatgggaaaagagataatttaatcaaatcactcaacgaatataaaacatttattcgatatcctgcggctgatggtattattaaaaaaataactttattaaaagaaacttgtatgaatacaatagtgtcaacaagaaaaccttttgggttagcgacaaatgttgttccgtcttgttctggagaattgactcttcgttacaataaaggaacagggaaatatccgtctgataaagttatcattggtagagatttaattaataagtggaaggttatgatttcttatttaagctctgaacatgcaggccaaccagataaatctggaatgtttagagtattgtcaacaatggaaattttacctcctactcatatctgcacagaaacttaccttttagcaggatggtcagattctcaagaagaagctgaaaatattttaaaatatctcaaaactaaatttgtccgttttcttatagcacaaatagctgtatcacaacacataacgaaaaattgtttttcattcgtaccgctacaagatttcagtaaggcgtggacggatgaagaactttacgcaaaatacggtttaacggaagaagaaatagaattcatagaaagtatgatccgtccgatggaaggttaacgggagcaagaaaaagaggagcaaaagtcatggaaaagaacgggcgtttttttgaagggaagacgagcgcacggccaatgatttatgcctatgaggacgccagctatcccggttgtctgaaagtggggtacacggcggtggatgtggaaaaacgcgtagcgcagcagtaccctaccttgaggccggaagggaagaaaccctaccgggttatcttcgcggaaccagctctgtatgaagatggaagcagctttacggaccatgccgtacaccggatgctggagaaaaaaggcgtggagggagtgggcggggaatggttccgctgtacggagaaagaaatcagggcggcatggctggcggtgcgcacccggacggccaacatggaaaaccgcaccagggattttaccatgcgcccggaacaggcggaagccgtggagcggacgctgaactactttaaagcggaacgcgcggatggacgcacgccgcgttttctgtggaacgccaaaatgcgctttggcaaaacctttgccgcttaccagctggcacggcggttgaacgcgcgccgggcgctcatcctgaccttcaagccggcggtgcagacggcgtggaaggaagacctggaaacgcacctggactttgaaggctggcaattcatctgccgggaacaagggccggacgcccagcccattgacgagcaataccggcaggcggacgccggacggcctattgtgtgcttcggctcctttcaggactttctgggggtgaataaggaaacgggcggcatcaagccccagcatgaatgggtgcgggaaatcaactgggatctggttatctttgacgaataccactttggggcgtggaaggaaaacgccaaagccctgttcctgatggaggatgaggaagaagaatacaacaccgcgcccccggaaaccaacaccggcaatgtctgcgatgaacaggatctgcccatcacggcggaccactacctgtacctctccggaacgccgttccgcgctttgaactccggagaatttattgaagaacaaatctacagctggacgtattccgatgaacagcgcgccaaggctgcctggcagggggaaaataacccgtatgccgccctgccgcgcatggtgctgcttacctaccgcgtaccggaggacatccggcaaatcgctctggggggagagttcaacgaatttgacctgaacgtcttcttccaggcggaagggaaagggaataaagcccgctttacccatgaagaatacgtccagaaatggctggatctgatccgcggctcccatcatgccgcggcgacggatgagctgaagctgggcggcaaaaagccccccatgccttactcggatacccggctgatgagtttgcttaaccataccctgtggttcctgccggatgtgtcttcctgccacgccatgaacaacctgctgcaacaacgtcagaataccttttaccacgactatcaggtcatcgtctgcgccggaccggaagccggcacgggggcgaacgccttgccgcccgtgttgaaggccatgggcggcaatccgctggaaagtaaaaccattacgctttcttgcggcaaattgaccacgggcgttaccgtcaagccctgggccggcatcttcatgctgcgcaatctctccagcccggaaacttacttccaggcagccttccgggtgcaaagcccgtggacggtggacagtgatcagccggggaaaaaagaaatcgtcaaacccaactgctacgtctttgactttgccctggaccgcgcccttaagcaaatagctgactacagctgccgcctgaacgccaacccgggcaatccggaagccaaggtgaaggagttcatcagctttcttcccgtactggcctacgacggcagcgccatgaaacaggtggaagccgcggaaatactggatatggccatggcgggaaccagcgccaccctgctggccagacgctgggaaagcgccctgctggtcaatgtggataacgtcaccctgcagcgcctgcttgccagccgggaagccatggatgccctgatgagcattgaaggcttccgcaatctgaacagtgatcttgagaccattatcaacaaatcagatgccgtcaaaggaatgcgcaaaggaaaagacgatctgacccctaaggaaaaaaaagacctctcacaggaagaaaaggaaatcaaatccctgcgcaggcagatacagcagaaactgatcaaatttgccgccagaatccccatcttcatgtatctgtcagactttcgggaatactgcctgaaagatgtgatcacccaactggagccgcatctgttccggaaagtaaccgggctgacggaaaaagattttgaactgctcgtcagcctgaacgtctttaatgaggccctgatgaatgatgccgtgtacaagttcaaacggtatgaagacgccagtcttgtttatacgggcatcaatcgccacgcggaggaaaacgtggggctgtacgctaccgtcctgagccgggaagactatgaaaagatggccggagcccagcaggattccatggtcggcgctgtagaggaaaaagtccttccctccccaacggcggatgaccgcatcgcctgccgtccggaagaggaagaaaaggaacctccgcccgctccgaacgtgcgtattcgtaaagggacgctccttacccaccgggaatacggcacgggcattgtagtaaagttggacgaatcctccggccgaatgaccgtaaaatttggcgaagagaaaaaactcttcccctacccgcgaagcctggaacaaggaaaactcatccctgctgagaaggcaatcccggaaaaagaggggaattaacctctccataaaaacaggagggggcgtcccttactgttcatggagccgcatcatcttaaactcccgtttaacggtacggacgacgcgccagagcagcagcaccgccgctacagacaagccgatgatgaatcccgtccagatgccgcgcgctcccatggccgggacaatccagtccgtacgggcgaggatgtagcacgccggaaatcctaccatccaataagagaagaacgtaatgaaggtaatggacgccgtgtcccggaatcctctcagaaccccgacggaaagcacctgcaaacagtccggaagctggtaggccgccgccagaaccagcaggacggaagccgtgctgacaatcagctccgagtcattgtacaggtgcacaatctgctcgcggaacagggtgatgcctccaaaggtgcacagacagatggtgagcaccagcacataggaagacagaatggcggatctggtgcctgccaggtcattcctgccgtgatggtacgccacgcggatggaagccgccagccctacggagagcgggagcatgaacaccaggcctcccacgttcccggcaatctggtggctcgccacctgagtctctcccagcggagccagcaccagagccgccgcgcagaagagcatcacctcgcacagctgggaaacgcctatcggcacgcccagacgcaccaggtgcgtgatgacggaaggcgtaggccgccgccaggaaatgatgtgcctgcggtacggcctgtgcttgggattgaagtaaaccagcaggaacatcagcaggaattcaatgtagaaaatgactgccgtggccgcgccgcaccccgctccgcccatgcggggaaaaccgtacatgccgaagacgaacatgtagttcaggggaatgttgagcagcaggccgcacaatcccacgtacatggcgggacgcgtcatgttggagccttcgttcaggctcttcagggccacgaatcccaggttggcgggaaggccccacataatggcgaacatgtaggcggaagccatccggcacatggcggcgtcatcggaaatccagccgaatacatttctcaacacataaatgaccggcatggaaaccaggctgagcatcaacgccagccacaggccgtggttggtcatgtagcccacgcggctttcatggcttttcccccgcatgttggcaatcacggggccgatgatcatcagcacgccgcaggcgaagagagccacgggcaggtacacggaagaccccagggccacggcggccatgtccgtcacgccggcgcgcccggccacaatagcgtccaccgcccccatgcccacaatggagaggttgaccaccagcaccggaagggccagcggtatcaactttttcatttccttcaaattccacgtcttattcattttttatttccttccatgcattcctcattcaaaggagccggaacatgccggcaaacaagccggaccggagcggcaggctccaatccggcttcaaatttaagggttaccaaccgtaccgggccttccgccccgtccgggacattcagcggtcaagcaccacgcgggcacattgttcagccacctggcggaacgcggcggaaaccggattttgcccgggatcttccagggccacggggcggccttcgtccccgccgaagcgggtggaaatatccagcggaatcttgccgagcaggggcactcccagtttagccgcttcccgttcgccgcctccttcgccaaagatatggtaaatcttgccgtcagaggggcactggaaataactcatgttttcaattatgcccagaatgggggtttccacccgttcaaagaggccgatcgccttgcgggcgtcaatcagcgccacttcctgcggggtggtcactaccaccacgccgtccagttcggccgtctggacaatggtcagctgaatgtctccggtgccgggaggcaggtccagaatcagaaaatccacatccccccatgccacgttgcgcaggaactgctggacgtagcgtgtcgccagaggaccgcgcaccgctacaggatcggattcattaatcagcagccccatggaaagaagtttcacgccatgggccgttaccgggataaattcgtcattctcattggctccggggcgttccttggtgccgaacatcagggacatggaagggccgtaaatatccaggtccaccagaccgacggaataccccagcttgctcagggccaccgccaggttcgcggaaacggtggatttgcccaccccgcccttgccggaagccacggcaatgacgtgcttggcgccgggaacggaggatttccaggtagagggatcgtcattgattccttttttggcttccggagccttatgctcgatattgacgtcgcagtgcttcacgccgggcaaatgcttcatcacgccgtgaacgccttcaaaaatgtaacggggaatatccgcatttttgctctcaatcaccaaatcaatcgtgacgttgttttcagcgtcaatgtcaatctttttcaccagcccgaaagatacgatgtcgcggctgaaccccggaaattttaccgtggtcagcgcagcccgtatcaattccggagtcaattcctgttgtgtcgtcatatctctgaaatattcatggttgcatcaacattccggccccgcgcctccggaatgcagaatgctccggaatatgaaaaaaggggacggcaaaaccgggaagtaaaaatactcccttttttatttttgacaacgcctaattcagacaaaacggctttttgcccgccggatttgcaatgccccggatactaagaaatggcgggacggccgcagccccgctattggtgaaataaagaacaggagggagggggaaaatttattccccctgctgcttcagggtctcccggatatcctggagagcggcgatgaaatcatccaaaatttccgcaggcaccataatccggtcccggttggagctcaccttttccgtaatacgcaccactttgccgcgcgcattctgtttgagatcaagaaagaacgtcttgcgttccgcaatgattttttctgtacaaataatatcgtcctccacggctgtaatctacctctggttgaatgaggatttcaggataaagcttccccgctggcgggtcaatgttttatttaccccggcagatgcgaccgggaagcaaaaaccggaaaaataacggtattttcccggcagggcatccgttctccgggcaaactggcagcaatccggcgttaactgcggcaacgtgattgaccaacatgaatggagaacaggaaagaacacaggagccgtctcaaaaaaggacaccgtcgcccgaacctgttcacgaagctcattgctcctcttcctgttcattttgagccattcaaccggcaggaggaaccttttccgcccttcagcttccggcccgcccctcgcaaaggaacgggaagaaaaaggaaaagccatgaggggcgcccacgtcccctgggaaggagcgccgcccctcagcattccgcacgccatctggcctgctccgtcttgtagagcttgtacgtgacggcgtccgccagggcttccaggctggcctcaataatgttgtaggaaacgcccacggtggtccaggtggcgacgccgtccgaggactcaataagcacgcggacattggagccggtgccgttttcatcctccgcctccggaatgttcgtccgggtgggggaaagcacgcgcaccttgtagtcgatgaggtgcatctgttccaattccggataccagcgcgtcagggcgcggcgcagggccctgtccagcgcatgcacggggccaaagcccccggcggcggtgtgctccacattgccgtggacatccagcttgagggaggcttccaccatcatgtccgggtccatttcatggcgtgaggtcagcaccacagtgcgcaggatgttgaaatacggtttcaaggcattgtccggcatgtgccgcaggaagagcagctccgcgctggccggggcggccacgtaatcataccccagtgcggcatttttcttcacggcggcggaaagcacgtccagaagggggtcccccttttccagttcaaaacccagggtgcgggacagggaaaggatgttgctcctgccgccctgctccgtcatcagcacgcgctgggcgttccccacaagggaggggtcgatgtgctcgtacaaagcggcttccttcataatcgcgctgacatgcactccgcccttgtgggcgaaagcggcgttccctacgaagggctgccgccggaaaggcgccagattggatacttccgagacaaaggcggcagtggatttgagccgcgtcagggaagcgccgctgaggcaggaaaagcctttcatcttcacctggaggttggggatgacggaacaaagattggcatttccgcaacgctccccgatgccgtttacggtcccctgcacctggatggctccgctgtttaccgcggccaggctgttggcgacggccagttcacagtcattgtgggcgtggatgcccagaagggcatgcggcaggcgttccctgaccgtcctgataatggagctgatttcctccggcatggtgcctccgttggtatcgcacagcaccaggcagtccactccatgttcccaggctgtccggagcacagccagggcgtattccggctcccgcttgaagccgtcaaaaaagtgttctgcgtcaaaaaaggcttcttccatatttttcttaaggaaggaaatggaattgccgatgatttccagattgcgttcccgggaaatgcccaaggccacttccacatggcgggggcaggatttcccaaaaaccgcggccacccgcgcgccgctggatatcagggcggccagcgtgggatccgtctccggagtatgggaaggatggtgcgtgcttccaaaagcggccagctttgcatgccttagtccgacacctctcatggcgttgaaaaattccgtttccaccggattggcgccgggccagccgccctcaatgtaatccatgcccagataatccagctggcgggcgatgcggaccttgtccgtcgcgctcaggttgacgtcttcactctgcgcgccgtcccgcaacgtagtatcatagagaaagattttggtggacatccccttgattcatacatgcaaacgggaagccgttcaagaccgggccccggcttttcccctgatgcagacacgaaaagcgcaaggcttgaaggagaaaccggcttccagtagaatggccgccatgagtttactcaggcagtctctttatctccttttcctcttcctttccgtgtcccttccctccccggcggccatttccgcccacccttttctggacagggagcgtcccatccgctggagccggctgactccggacaaactggaaccggatattcaggaagccatgcgccgcacccgggcctccgtagaggaaatcagccgcctccgtccggaggaaatgacgtatgaaaatacattcggagcgctggagaaaagcaatggcctccttacggaaggcatgtgcaaggcctatgtcctgaaaagcctgtgcgacagcggggaacttcgcaaggccatggattccgtggctccccgcgtgtccgccttcctttcctccgtcacgaaagatcaggccctgtggaaagtcctgaaaaccgcggaggaacgcctgcggcaaacccatctgactcccgaacagaaacggtacatggaactaagcatgcagagcttccgggacaacggcgctgatctgccgccggacaagcgcgcacggcttgaggccattgacagggaactgacgctcgcctcccagcgtttcaacaatttgtacatggacgccaggaaatcctggacctggacggtgcgggacgccgctcttctggaagggatagacggaagcgccctgcaacaggcgcgcaaggagttcctgaggcgccatcccggccagtccgatccgggctggacgtttacgctggattccgcggcttccgcccgggtcatggaaaaagcccgccgggaagaatgccggaaggatttatgggaacaccgccagtctctggctacgggagcatgcgacacggaacccgtcatcagggaaatcctttccctgcgccgtgaaaaggcgcatttgtgcggatataaggaatacccggattacgccctgcgcgagagcatggcggaaaacggggaaaacgccataaagttcgtcaatgagctgctggacaagatcaaggccctcctttttccgtgaaatggaaactctccgccgcctgaaggcccgtcgcacggggcaggaaaaagcccgcctgaatccctgggacgtggcctattacgccaatctccaggcggaggaacgtttccggctggaccaggaggagctgcgccgctactttccccttccccgcgttctggacggcctgttttccctggcggaacggttgtacggcatccgcgtagcggaagttccggcacggcaggccttatccggcatcccggcagacaaatccgccggaaccgtagaggtctggcatccggatgtgcgctttttcacgattgacgacggcaacggcaaccgcctgggctccttttatctggatctttactcccgtaacaataaacgggccggagcgtggatgaacaccctggacacgggcagcccgtccacgccggagaccccgggaaagccgcgcctgggcatggtctgcctcaatattcacccgcccgcggcaggacacgcggtgacgctgacccaccgggaagtcaggactttattccatgaattcggccatttgctgcacctgatgtttaccagggttgccatctcctccctggcgggaaccagcgtgccgcgggattttgtggaagtcccctcccatttcatggaaaactggtgctggcgtccggacgtgctgaaaagcttcgcccggcatgaacaaacgggcctccccattccggaggagatgctgcgctctctggacgcctcccgaggcaatacgccagccctcgcgctggccgggcagctcctgtacgccaagatggacctggccgtccatgcggcaccggaacgtttctcctccggttctctagatgatgtggattccgcggtagcgggagacatggactatttcaaaaatttcaaaagagccggcaagctgcgcacggcgcgccatttgttttcctccccttcgggctatgcctccttttacttctcctaccaatgggctgaagttctggacaaggatattttcgaagcctttgaacgggccggaggaccggacagggaaacggcaggaaaattccgggaaaccattctggaaaaaggatacgcggtgccgcccatgcggcagttcatggatttcatgggcagaaaaccgcgcatggacgccatgctccgcaagaggcggctggcatcctgaaatcaaaaagcctcaagccgccgcttccggacggcacagtcgcaagccacatattatacatttgtttaattaaattatcctttcattatgcaaaggttacagacattttgcagaattcagaacacatctttgcgttgactttgtaagaaaaagaagagaaaattcttccgctttgccgcaccttccggcaccagccgcaaccaaccgcattcatttatgtacaacaagcctttgacgtttgccgcaacaaccctgctcctttgctccccggtgatcatgctaacttcctgtgacggggaaaaggattccgccgcccaggcgccggcgctcgttcccgaagtgcaggtgaccaaactggtcacgaaggatgttcccatcaggcaggaatgggtgggcaccctgcgcggcacggaagatgccgaaatccgctcccaggtgacgggataccttctttccaaggattaccaggacggagcttatgtcaagaagggccaggtgcttttccagattgatccccgcccgttccaggcaacgctggaccaggcccagggaagattggaacaatatgaagccacgctgaaaaaatacaaactggacgtggaacgctacaccccgctggtgaagaccggctccgtcagccgcaaacagctggacgacgccctgcagcaggtccaggagacggaagccgccatcgccacggcaaaggcccaggtggacgaagccaggatcaatcttaaattcaccaccattacagcccccatttccggcctggccggcctggccaccccttccatcggcaacctgctgacgccctccagccccacgccgctgaccacaatttcctccattgaccccatccgggtggatttctccgtgagcgaacgggacttcctgaactccatggacaataatctgaccagtcagaagcacatcaagtttgacgtgattctggccaacggcacggaataccccatgcagggcgaacccgtagccattgacaggaatgtggatgcccagaccggcaccatcaacatcgtcgggcacattcccaatccgaacctgacgctgcggcccggcatgttcgtccgcgtccgcgccacggtgaaaacgctggaaaacgccgcgctggtgcctccgcgcgccattctgtccgcccagagcgccaaattcatcatttacctggatgacaagaacattccccacatgcaggtcgtcaacctcggccccgtcgttgacggcatgcaggtaatcaacgtcattcccatgccgcattccaccttcacgaaggacagccccatcgtggtggagggaatcatgcaggcggccaaggttcaggggcacgcccccgtcaagccgcttccctacaagcccgtagtttcccagcccgtcatgccctccataggggcccagtcctttgaaaaggccaaaacgccggaaggcatgaaggatggagaagcccagccgtccgccaaataacctcccttctccggagacccggcatcttccctttttccccgcgcatttccatgatttaacgccatgtccagcttcttcatcaaacacccgaccatcgccatcgtcatctcgatcgtgatgatcctgctcggcggcctgtccctgatggggctccccattgagcagtatcccaacatcgtcccgcccaccatcaagatgcaggcgacctacccgggcgcgaatgcggagacggtggccaattccgtagcctcccccattgagcagtccatttccggcgtcgtggggatggattacatgacttccaccaacgccaacaacggcatctgctccctgagcatcgtctttgaagtaggcacggaccccaacatggaccagacgctggcctacatgcgctacgggcaggccaccgcccagattcccgcggaagtctctcagatgggcatcaccatcacgcagtccacgggcagcccgctggccgtggtcaacctgtattctccggacgacagcctgaacgccatcttcctgagcaactacgcctacgtgagcctggtggaccccgtgaaacgcgttcccggcgtgggcgacgtgcaggtgttcggcgcgggccgctacgccatgcgcatctggctggacaccaccaaaatggccgcccagaacatctccgtgggagaagtccagtccgccatccaggcgcagaacaccgtaattcccggcggccagatcggcgcggagccggcccctcccggaacggaattcacctacagcatccagaccaaggggcgccttcagacggctgaggaattcggcaacatcatcatccgtgcggaggggaacaagctcctttacctgaaagacatcgccaaggtggagctgggctcccagacttacaacgtatccagcaaatacaacggcagggattccggcgccatcgccgtgtatgccgctcccggctccaacgccatcaacacggtggacgctctggtcaagctctttgaagaccgctcccgcagcttccccgccggaatggaatacaacctgacgctggacaccacgctggccgtgcgcgcctccattgaggaaattgagcacacgctggtggaagccctcctgctggtggtcctggtggtgttcgtcttcctgcaaggctggcgcgccacgctgattccggccatcgccgttccggtatccatcatcgccaccttcgcgctgtttccgctcctgggcttcacgttgaataccatctgcctcatgggcatggtgctggccatcggcctggtggtggatgacgccattgtggtggtggaagccgtggaatcccacatggagcgcggccttacgccccgccaggcggccttcgccgccatggaggaagtttccggccccgtcatcgccattgccctggtgcttgcggcggtgttcctgccctccctgctgctgccgggcattacaggcacgctcttccagcagtttgccgtgaccatcgccatttccatgcttatttccgcgttcaacgcgctgacgctctccccggcgctgtccgccattctgctcaaacccaaggacccgtccaagggaggcccgctgaaattcttctaccgcgttttcaaccgcagttatgacgccacggccagcggctacaccaaagtgtgccacttcctgacccgcaagctcatcatctccattccgctgctggctctgatcgcctacgcgattgtccccgtagccaagaaaatccccaacggcttcctgccggacgaagaccagggctacctgttcgcggccctgatcatgccggaagcccgctccctccagctgactacggccgccgcggacaaggtctccgaactcatccgtcagaacccgaacgtaaaagacgtgattgccatctccggcttcagcctgctgacgggcgtgcaaagcacgaacaatgccttcttcttcgtcatgctcaagccctgggaggaacgccccaatccggaccagagcgcccaggcggtcaccgcccagctgaacgccctgctgaccacgaaagtttccgaaggcatcaccatgtgcttccagcctccggccattgcgggggtaggttccgccaacggcgtcaccttcatgttggaagaccgcgacggcaagggtacggaatacctggcggaacaaacggacatctttgtgaaggaagcgaacaagcttccgatattcgacccgaacaacaacggcggcgtgcgcagtgtgatgtccttcgccgtggaacagaaagatgtgcggctggatgaagaaaaatgcgccacgctgggcgtcagcatcagtgaagccaacagcctgctccaggcctacatgggttccctgttcatcaactacatcaccctttacggccagcagtggcaagtgtacatccaggcgcagggcagtgaccgcaccggaacggacatgctcaaaaacttctacgtgaagaacaacacaggcagctccgtccccctttccaccctcgtgaaaatcacggatatcaaggggccggaattcctgctgcgccagaacctgtacaactcatccaagctcatggtcacgcccgcccagggctactccaactcccaggccatggaggcgctggaaaaaacctttgaagccagcatgccttccgacatgggctacagctatgcggacatgagctaccaggaacaaaaaatccagaacggcatcggcatcgtgcagattttcctgctctcctccgtctttgtcttcctgattctggcggccctgtatgaacggtggtccctgcccctcagcatcttcatgacggtgcccatcgcggccctcggcgcgttcctgggcctgtactggttcggttatgaattgaacctgtacgcgcaaatcggcctggtgatgcttatcggactggcggccaagaatgccattctgattgtggaattcgccgtcattgaaatggaacgcggcaagacgctgatggaagcgacgctttccgccgccagaatccgcctgcgccccatcctgatgacatccttcgctttcattctgggctgcgttccgctggcgctggcctccggttccggcgcttattcccgcaatatcatcggtatcgtggtcattgccgggatgacgatggcgacggtcgtgggcattttcctgattccgtgctccttctacttcatcatgaagctcttccgcgtacgcatcgcccggaagacggtggaaacggaagacccggacgaaatcatcgcccgcaaacacctgttccacgaagcccatgaatcgttaaaagggtaaaaccgcccctgcaaccatctaaaaacagactaaacgcatatgcgaacaaacccatacatcacacgcgccatcctgctgggaacggcttttgccgcctcctcctgcatgatgggccccgacttcaaaccggtggacatgcccatgcccgcggcattcaggggagcccccgcggcgacggaatccattgcggaccttccctggtggaaagttttcaaaaacaaggatcttcaggacctcctgacggacacctacaataacaaccgcgatttgaaagctaccatggcgcgcgtggaaaaggcacgccagtacatcaccatcacggaggccccgctcttcccgtgggcgaattattccggctccgtcagcaaaggctccaactataccggcggcagcatcgtccagactaccggaaccacactgacgcctggagcgcttgccgccggcatttcctgggaactggatatctggggcaaaacgcgccggatgacggaagctgcccgcgcggactatctggcttccgaagaaggccagcgcgcgctcatgctttccctgctccgccaggtggcggactcctacctccagctcctccagctggacgaacagcttgccattgtgcagaaatccgtggaatcctattccgaaagcctgcgcctgtttgacgaacagcttgaaggccaggtaggcgacaggctccaggtggcttccgccaaggcggccctggcttcctcccaggcccagattcccgctattcaggtgcaaatcgccaatctggaaaatgcagtctccgtcctagccggacgcgctcccggccatatccgccgttccggcagcacccgggacatcgcctataacgtcaaggttcccgccggcattccggcctacatcctttccagaaggcctgacgtccgccaaagcgaataccagctgcgcgccgccaatgcggaggtaggagtggccattaccaactacttcccgaccatctccctgacggcggcgggcggcctggcctccgcagatctgcgccacgtgcaggggcgccgcggcggctgggggctgggagccaatctgaccggccccctcttccaggcgggcaagctgacggcttccgaaaaggcggccaaggctgaattcctggcggccagaaacgattatgaacaaacggttctcaatgccctggcggaagtttccagcacgcttatccagagggacaagctgcgcagcatcaccgccacccagtccgaagccgtggaagcctaccacacggcggtgaaactctcctttgagcgctaccgcacgggcctttccaattacattgaagtattgtacgcccagcagaacctgtaccccgctcagattcagctttcacagtattattaccagcatgccagcacgctggtttccctgtacacggccctgggcggcggctggaatatgagccacaaggctatcatggacgggccctgccaggcggtaaaacgcgccctttaaaacagggaattttcctgactgttttttcatcctccggcaagtacagcttgccggaggattttttatccgttccgcggattgccaatccgctgacaattaaaaaagttgaaggtaaatgcattgtttaatataatgcgttgattgttatttgtattgggtgattttggtctttttctaattcattccttctgttatgattttccatcctttcctcctgtcggcagaggcagaaggacgcaaacggattggcaattcgataaaaaacgaaagttcctttacagaggggcacttttaccaactgttacaaacaatcaacatgaagactaaatattttgctctcctgatcgccgccatgggaagtagcttatccctaggggcctccatcagtaatctggagtccgcctattcaaaaaattccaccgtttatgacgggacaaacggggatacgctggacgtttccacccccacgactcttaacgtaaacgccaacggctcctggacaatggcattcaccgtttccaatctgactgcaacctcagattcgaatgtagggctgctgtttacctacaataccaccaaaccttattacaatctggaaggaatgggctatcagctggcggaggacggaacactcaccctgaacgtaggcggctttaactacaacggaggaaacgctgcctcctccccctggaaaacgcaaacgttttccggttattccgccagcccccccctgaccctgttttacacattcagcaggggaactgtttccatctccgccatgctggggaatgacacgtccacgctgaccacgctgagcaacctcagcggcagcggagtcaccttccgagaccagaacatgacccagatcaacttttccgccaaagacgccaccaaagacacatggagcgctccgaacggaatcacgggaaaatacaccttgaataattttgacctgtacacggccgttttgacggaagaccagatgaaggaatacgccctgagcgccgttccggaaccggctgcggcctctctcggcctgctgggtctgggcatccttctgatgcgccgccgcagggcctgactttttccttcccgcgtccattcctgctccgttcagggatggacgttttcttcactctttttcaaatatccttttcatttttccttgacgctctgatgaaagtccggctccctctccccctcctggctgccctggcggcggcattccccgcagcaaccgccgccccggcgggcacggaactgggaaacgtcatgttcgttggggattccatcacccacggggtcaacagcgcctcctaccgctgggctctccataaaatatttacagacaacggcatttcctaccgggcggaaggcgtcaaaaccggcaattattccgggggagttactgcgggcacttcctacgggggccagatattcaacaatgaacattcctcccaggcaagcgccagggcatgggaaatatccggcaggagcaacggaagcaggtttgacggctccaacattaacaactggctggggctttccggcaccaaggcaaacggaagcgcctattcaggccagacattcaccggagacaatacgccggatacctttttcatgatgatcggcaccaacgatctcctttccgacggaaacaacgccacgctggcgaaccgccttgactccgtttcccaaaacctcctgaacgatatggacaccatcgtggaggccatgttccaggccaatgaacatgcgaatgtcatcatccttaccattccctgctggacccggcactccaacggcaattcggacgccacccaccaggccgtggctgattacaatgatcgtctgaaaacatgggggaatggcaggcagaacgtcacggtcattgacgtcaatgccggcatcattgacgtaacatcctccacgccgttctacggcgtaagctccatgttcaacaaccccggcagcgacggcctccatcccaatgcccagggagatctgcttatggccggcaatatcgccagggccatgggctacgcggggcgcaccgccggacaggaaagaaaagcagctggcggcctggccatcaattttcaccagggcgggcaatcccccgcatggagctcgaacagccacttggaaaataaagggttttccctcgccaatgtcactgtggacgagaacggcatcagcctggggcaatccggggaaagctccatttcctattcctgggcggaagggacggatctgcaaaacggctttacctttgattgcaacctggttctgggaaacggcgcagcagacggatgggatactgcctccgatttcagcatcagcctggggaacagctccttttacggcacgctcaatattaatgaggcctacatcaaatggggcgatgccattctgtattccctggacatgtccgccaatgcggaaaacctgcgtatggcatatatccgcggcaatgagctggaagggctgaaaggcggctattacgtctggctgggggacatgctgattggggaagcgctttccgttacctccggctccggctgcaacggcctcaccattcaatacaacggcagcggaaccgctgttctgcacgacctggccctggacggcacgggttcctatgccccagccacttccggaacgcttaacgcggaaaagtcttttatttcttccggctccttcacccagagtggaacaccggaaggcaatattgagtggaaaacggagggattcaccaaaaccgctgataatctggccggctccggtacctttaatgcccgcgcccaggcggattcctccgcagggggaacggggaattccgtaaacgtctccattacctccggaaacgccactcatatttatgcgaacagcggcaactacacgggagacgtctggctgaccatctccaaggagggacaggcctccgcctggtacggagctcacggagcttccggcacgctcaacgggaacgtcttcctccgtttcacggatgccgccacaggcggaagcacggtcttcggtgccgtgaacgccgccggcgtcaccggaaacgtttatctggaattctctgcggaaaacgcctccttcggcaccttcaccagcagtaattcctcctctgtggtcggctcctatgccacggatatccaggggaatgtggacattgtggtcaactccggcaccttcaaccatcaaatcatgggcggcatcttcgcaaatgccaataccaccattggaggaaacacgcatgtttacatcaatggcggctccgtcaccggaaatgttatgggcggcggcctgacaggctccatttccggcggcgccaacgtcaccgtcacaggcggcgttatcagcggttccgtttacggcgcgggccagggaggctctatccttgcaggaagctcggtttgcttgacaggaggcctggtgaaaggggacgtttacgccggtggcaaggcgggttccattcagggggacacgtccgtcaccatcaccggaaacacggccacgctttataacgggagctcctggggcagcatctccggcggcggttccggcggaacggtgaagggaaactccaccgtacgcatccagaatctttcctcaggaacgacggcctacggctttgacaagtacgccggaaacatcagcggcggaaccaatgtaagcggagacaggagcctggtgctggaccatgtaaccgtggacagcctccaggcttccctgagtgacttcacccatgtttccgccgtcaaccagacccgcacctcgctggattccctgggcggggcgctcaccgtaaccattgaggcgggaagcagccttatcctgaacggaacctctgacctgaccacgcttattctgggggaacacgcctccctgacgcttcaggggctcaccgcagatgcggtcgtcgtggacatcacgggaacaaccaattacacactctccctgacagagatacctgccagcttggacaacatcaaattcctgaacgacggcgttctgtacgacgcggccatgtccatggatcttcaggccaattccgccatgcttttcgcccaggtgccggaacccggaagcaccgccctggccttggccggactggcccccctcctgtggaggaggcgcagaaaaatgtcccattgaggcccttcgttttcttcaggccctgatggacaaaagaagcccccgccggcgcaacgccggcgggggcttcccatgcggaaaaacggcggagaagaaaaggaaaagcatccatccctccccgggcgtttttcatggaacgggaggagatcaggcccctctgtttttaaacagttccagtgcgagctgagaccaggtctccagtttctcaaacatttccccggacagttcctccggagaaacaaaacggagattggccagggctgcttcattcgcgcgcacacggtccgtatccagctcaaacaggtggacaatgcccagatgcacggcccctacgtcattggtatcgtcattaatcacgccgagaacccgctgggtgcagttcccgtcaataaccagttcctcgcggatttcgcgctccactccggccagataggtggaaacgtcgtcatggccggattggcggtccaccggattgatatggcctccgatgccgatggaacccttgtcatgcaggcgggcctcgccgccggagcctccgcgcgtgtaatgcagaatgcggccctggtggcagaaaatggcataggcgatgatctgtttgtgggaaggatcattttccgcagcctcccggtccatgaacgaggcgacgcccggcttcatgaacacattcagataatgatccccgccttcccggtgtccctggaaatagcccgcttcctcaaaggcggcgcggggaaccaccagaacctgttctccatggtaacgtgacatggagacaccctacccgttttcatcccgcgctcaacaaaaaaggcgctgaaacggcaaatttgccccttccttcaggaaggcgcgggctgcccctccgcatcaggagacatccttcacttccacgccatgattccggaacctgcgcatgatgctttccagctgttccgcatccatgagatggagcggcagccacagcaccagcttcttgccgaacaggaacagcagcgcgtggcgcgtcctgcacaacgtggaaaaacggtcgtagggaatattcatggggtcaacgcccttgctggagaacgtcaggtaatcctcatgaaaaacgtaatccttttcctgatggtacatgggcacctttttattggcggccagagcggcctttgccagaaaggggacgtaaaaccaggacaggataatcgccatcagcgccccggccagggacagccaggcgaataagggcagtgggcgcagggaaaaggaatacagcgccatcaatacaaaaaaggccgtaatggccaggtccagcggctttttccacctggggcgcaccgcatggtaccatgccaccagcacctgggttgccaggcggtcggaaggtacgggcttgacgagtttgatgacttctgaatcctgcatcatggcggcagggtatcttcattcccgctgaagaaaaagcctaaaagcaggctcttccgccgccatggtgtcaaaaaagcccctccggaaaggtctcttcccccctttttcccgcctcccattcacgggggaaagcctccttcccccgtatgcaggccagaatttccttgataatcatgcctcccttcatagaatgaaaaaccaaaagccttcagaagacccggtggcagacaatcttcaaattcacgtacgcacgttccagccctcaaccactcaggcacaggctctggaaaccctgacggattccatggcggaagtccttgacgaccgacagctaagacacatcaagaatgcggttcttctgcgtgaggaaacgcagaccacctatctggatcacggcctggccgtcccccacggacgcaccagcgcgctggattccatgcaggtcaccgtaggcatcagcccagagggcgtcctctggccggacgattcccgcaacgctcatctcattgtgatgctgggcgtgcccgccgccatggtgaccggctacctgaccaccatgcagaaattgctgcggtggcataaaaacgcccccctgggccccaacggggaatggacgggagatgaagccagtctcctggcgtcccttcaacaagccctgcaatgacggacaagaaaaaccagcctgcggaaaagacgcgcctttcctggtcatggctgcgcatggcgttgagcctgcgtgaaaaaatcaagctgggggacaagcaggtcatcttcatctgggcggtcgtcgtcggagcgctgggtgccctgatggcccttgtctttgaaatgggcgtggaactggtgcaggacgtcctgacggggcggaccagctacaggcaaattcaggtctttcaggaaatggccggccaggacccggcctggtgcatcttcgttccggcggcgggcggccttttggcggggcttacgcttcttttcacccaccgctttgtgccggccaaggcgacggaatacatggaagccgtggcgctgggcaatggatacgtgcctcccaagcccagccttctgcgttccctgtccgccgttttctccgtaggttccggcgcctccatcggccgtgaaggcccgctggtgcaggccgccgccgtagcgggctccgccctggggcgtttctttcacctctcagctcctcgcctgcgcctggtagtggcctgcgccgccgcctccggcatgtcctccgccttccatacgcccctggcgggcggcctgttcgtaagtgaaatcgttctgggcgcgctgacgattgatttcctggcacccctgctcgtggccagctgcgcgggctattttaccatgggcctgttccatgaacccgcccccatctaccagctccagcaggaagtctctctggcaggcaaccagcatgtgctctggtgcgtgctgctgggggccctggcctccctggtcgccagtttctggctcctcatcctcaaaaaatcgcgccggtacctgaacggcaagcgccaatggctgcccgtgcgcctgacggcggcaggcgtgctggtgggagccatcgccatcttttacccggaaatcgtagggaacggcaaaaatatcatcacctccctcattcattatgaatttgacgccgcgagagccgccgtcctgctgttcctgaaaatattcaccgtcgccatcgtcttcggcgtgggaaccgtggggggcgccctgacccccagcctgactatcgggagcgtctgcggcttcctgttcagcgcggctcttacccagctgggggtgcccggggaccatgccatcgcctattccctggtgggcatggccgcctttttcactacagccgcgaacgccccaatcacctctctggtgctggtggtggaattcaccatggccgggcagatgatgttccccctgattatcggagtgctggtttcctacggaatggccaagctcaccaaagcccagtccatgtaccatgattccctggccttcggccccagaagcacctttgacaaacccctggcccaggtacagcttcaggatgtagcgcgcaaggatccgcccgtggtgcatcccctggacaaattcggcaccattgccgccatgctcattaaaaacccggcccagcccatcttcgtcacttccccgaccggcaaatacctgggaagcgtggtggcggaagacgtggcggcctttgcccgcaacaaagagctggcccaggccgtactggccatggatgtgctgcgcagcgacatgcctacgcttcctgcggacatgcacctcccggaagccctgggcattttctcccgcccccactgcgcggaatccctggcccttgtgaacccgaacaacgatctgctgctgggcgtggtcaacaagacggacctctacctggtgctctccgaaatcatgcgcagggaaaagctgcaataagggctgcctttccgcattaacatccgttgaaatagcggaaaaaaacgccgcttccatcctcggattacgggaaatgtccgttcaaaaccgaacacccggcccgtccaaaggacattttcctttctccgtgtccgcagcgccccgccttcctttcacgccttatccgggcatggcatcagagagacgacgtattcggggatgtttctccatcccgttcatgaaaaaacacagggcaaaggcatgctttccccggcacaagcgccctgccgccattgcggaaagtgaatccgacttcttccaaagacctttgcccggagcctctccggcaaaatttacttcctccggaaaacgcggaagagccgggaagcgtatttttttcctcttcttttttcacaataggggtcaggttaaaaataacaacaaacttgcatttcagaccttttccggtacgcttccggcatgagccgcaccctgagaatagaataccccggagcagtctatcacgtgcagagcgagggcaaccgcggagacgccatttatctggatgacgaagacagagaaatctttctgcggacttttcaggaggcgtcccgcagaagcggatggaccgtgtacgcctacgccctgatggccaatcactaccacattcttttccaaaccgcgcgcgccaatctggtggatggcatgaaatggctccagaccgcttatacccagcgttttaacgcgcgccaccgaatgcgtgggcatctgttcgcgggcagataccacgccatggtggtggaagcggataacgcccactatttttcaactatcattgactacatccacctgaatccggcccggtccggcctggcgcgccgccatacgttcctttccggctgcaaatggacgagcctgcccgcatggctggactctcccgcaaaaagacccaaatggattcatccggaacgcggcctcgtctgcttcggctgcgacgacacggaggacggacgccaaaagtacctcaaccatctgatgggccgctttgaagcggaacgcatggatgaacgctccctgctgcccgccggccacgttggccccggcaccgtccagcggggctggtgctacggctccagcgccttccgtgccaggctggtgggggaacttccccggctggcgcgcagaaagcccgtcacgacggggatgcgcgcatcggagatcggggaataccaggcggaaatcatcgtcaaaaacgggttgaaagcattcggcctatcggaggaggagctgcttgtcacgccttacagtcacccgtccaagctcatcatcgccctggccgtccggcaaagcacgctggtaccgtatgcctggatcagcaaccggctgcacatgggcattcccaaatccatgggaaccttgctccaccgggcaaaaaaaatggcggaaacggatttgaaaacgagggcgtggatcgagcgcctgagctcctgacctccgttcctcccacggaataatttgaaaaactttcctcccgccacaaggatgcgccgggcatgaaaccgtcatcccgcggcaggaagcactcaaggtcagccccttctccggcacatcatcatgcagaccggcccaagcaatcccacggatgccgcagccggttccggaactactgaaaaagccatggcggcaattccggctttctgccaccaatgcggaaaccaagatggctcccacccagcgttgtttgtaacattccatctctgccgccttgtctgttcctgataattttttcctttgtcatccattctgcatggacaccggattcaaaatccgccttatggaaacaggaacccgaataaccgcatacaaactccatgtccccagcatccgaaacacgcagttctggcaggcgtcaatcagcaagaatggggtcagtttacaaatcacaacatataaacatattttctattttcttactgacccctgaaagccgccagggaaaaaaatgattgccagcccgcttcgcggaatgataaacggaaagcgcgtgcgaaaaactgcgcgtaaagcgtcaacccaaatacaacaacagaaaagatggcacagacatattcccagcgcgtgctcgacttggttaaggccaagcatagccacgaaaaagaattcatccaggccgttcaggaagtgctcagcacaattgaaccggttttggccgcgaattccaagtatgaagaccacgcgattctggaacggatcgtggaaccggaaagaaccatcctgttccgcgtgccgtggatcgatgaccagggcaaggttcaggtgaaccgcgggtaccgtgtggaattcaacagcgccatcggaccgtacaagggcggcctccgcttccaccccagcgtcaacctcggtatcctgaagttcctgggttttgaacaggttttcaaaaactccctcaccacccttcccatgggcggcggcaagggcggttccgacttcgaccccaagggcaagagcgataatgaagtgatgcgcttctgccagagcttcatgacggagcttcagcgccacatcggcgcggatacggacgttcccgcgggggacatcggcgtgggcggccgcgaaatcggctacctgttcggacaatacaagagaattcgcaacgaattcaccggcgttctcaccggcaagagcctgaactggggcggctccctcatccgtccggaagccaccggctacggttgcgtatactttgcccagaacatgcttgccacccgcaacgacggcctgcagggcaaggtctgcctggtgtccggttccggcaatgtagcccagtacacggtggaaaaacttaacgaactgggcgcgaaagcggtcacgatgtccgactccaacggctatgtttacgatccggacggcatttccccggaaaaactggcctgggtcatggaactcaagaacaagcgccgcggacgcattgcggaatacgtgaagcagttcccgaaggcccagtactttgaaggccagcgcccctggagcgttccgtgcgactgcgccttcccctccgccacgcagaatgaaatcaacggggaagacgcccgtaccctcatcaagaacggatgcaccctggtggcggaaggcgccaacatgcctacggacctggaaggcattgaaacctacctggccgccaaaatcctgtacggcccggccaaggccgccaatgccggcggtgtggccacctccggcctggaaatgtcccagaacagccagcgcctctcctggacgcgtgaagaagtggaccacaagctgaaaaccatcatggccaacatccacgcaaacgccgtggcccacgcccaggaatactcctccgacaaatccttcaccaactacgtcaccggcgccaacatcgccggcttcgtgaaagtggcggattccatgatcgaccagggggtagtctgaccccggcccgacatacttgctgccaatgtaaaacacaccagaagcgccgggttcgcccggcgcttctcttttctacggaaatgtctccattccggaagttcctttttcccgtatgggccagacatggcggcggaaggacttcaaaagcctcccggcattggggacaaccaccctcaggactttttcccggctgcagggactttatctgctgcatcacggcagtctccgactattcagactgggcggtcaaaagcgagccagatgacctgcttccggaatttgaagggctattctcttccccctttcccattttcctgcatcaagaaccggaaaaacgcttccccggctccaattcttaaaagatactgttattcctttaacaggcggcagacggcctgggccgcatgttccgccgcccctccctgccccaacttgtcggaggcctgtttcatttccttcagcagggcatccctgttttccggaacaagcagacgttctatttcaccaatcaccttgtccggcgtaaaatcaaactgaatcagctccttcaccacaggtttctgcgccaggatattcaccatgccgatgaagcgtatcttgatgagcatgcgggccatccagtacgtcagcaggggaaccttgtacaccagcgtgtacggcaggcggtgcaaggcggcctccatggtggcggtgccggaagccactacccccacggcggcgcggtccatcagctcatgatatccccccaccgtaatgtggaacagctccggcggcatgccggccttccgcgccatgccgcgcattctttccgccagagcctccgtggaagcggcggtttcaaaggacagttccggccgttcccgggaaagacggctcactacctctataaataccgggaaatgcctgtcaatttcacgattccggctgccgggaaacagaccgaccagtgacggctcccggacgccctccttacggatggatgcaatttcatccaccaggggatgccccacaaactccgttctcaggccggcttcctggaacaagggagcctcaaaagggaagatgcacatcatcaaatccagcatgcgcaccatcttgggaatgcgcccgcgatgccatgcccacacctgcggggagataaaataaacgattttggtgtggggacaacacttgcggaccctctccgccagccgcagattgaaccccggataatcaatcaaaacaaggcaatccggctggtcctgccgtatcctctccagaatggagagaaaacgccttctgaaccatccgtattttttgagcacctccaccacgccgataacggcggcttcatccgcccagtcttccacgccgggacataacgcgtgcatgccttggccgcccagccctgcgacctccatgccgggcatcaggcgcagcagattcttcaacagcagggcgccatgaatgtccccgctcttttcgcctgctatgatataaagcttcatcactatctgcatcggcgcacgccggacgcctctctaccttaccagccccgttcccgggacgcaataaaagactttcctttcaaggattttaatgcaagatacgcgccgttatgcatgagttgatctcactttggatgtcctgggtgcaggactggggatatgcgggtgtcatcgtcctgatggccatggaaagctccatctttcccgttcccagcgaagtggtcatcccgcccgcggccatcctgtccgcccaggaaggagcatccatgagcttctggggagtggtggctgccggaacgttcggctcctggctgggttctgccattacctacgccgtggcccgaatcgtgggccgcccggtcatcatgcgctggggcaaattctttttcatgccgccccacaaggtggaaaaggcggaaatcttccttcagcggtacgaagtttccggtgtcttcttcgcccgccttctgcccgttatccgccacctcatttccattcccgccggcattgtccgcatgggcttcggcattttctccctggtcaccgtgctcggctcgtttgcctggtgcacggtgctcgcctggtacgggcaccgcatcggtgaacggcatccggaactgctcaaatctccggaggagctgatccgtaccgtcaagagtgaaagccttccccttattctggccgtgttggttctggccgtctgttacatactcatgcttcgtctgacggaccgcaacaagccggaaaaagccgcagcggacacgtccgcagaaaaagaacaataaccctccctttttcccatgatcccttccaaggaagaccgggcagcccgggcgctggattatttccaccagggatataattgttcccaatccgtttttgctgcttttgcagatgtctgcggcctgacggaagaaacggccctgaagctgtcctctcccctgggggcaggcattggacgcatgcgggaggtatgcggtgctttttgcggactgagcatgctggcggggagcctgtacggaaacagttccccggaaaccggagaaaaggaaaaaatcttttccctggtccaatccctggccgcctccttcaaacaggaattcggcacgctttactgccgggaactgctggggctgtctccggagcgcctggctgcggaaacggcgcgccccggagaaaggactgccgcctattacgcctcccgcccctgtgaacgctgcattgccttctgcgcccgccgcgcggccgatctggaagcaaaagcccggcgtcacgaaaatacccggccccccttgcaggggaaccgggcgctttaaccatgagcaaggtgccgtcaatgggcggcggaactgctgcatgcgccgtccgggcaggacgccttcagcttgtcaatcttttcattggtttcccccatcccctcgtcataaaagccctgctcgtccggggccagcacctggaggaggcggagaaattcgcccgcgtgttccttttcctcattggaaatatccagcagaacttcctgggccagtttatggtctatggattctgcaagctgggtataaagctggatagcttcatattccgctgcaatcatgaaccggatggctctcactaattcgtcatgggtgagtttccgatcctcttttaggccgctaaatgcatttgtaaattcaggcatgcagatgggacctgatacgtaaccccttcattcaatatgctttgtcataacttttatacgacagtggccttaaagcagtccagcgaacaaatttccagcctctcttgccggaacaaaaaaagagcgccggattttctcccgccgctcctgttaatcaagttcctctccggaacacctgccttacttgccttccgctgtcttgggtgcgtatttcttgaaaaattcaacgtactgggcgggagtacggccgggaacataacccgtgcggcccagctccttgccatccgcatccaccaccaccatggccggcacgccggtaatgttatacgtcttggcttccttggacttgctgaaatccgaactgccgaactcaaatttgacgccaatggccacgccgtccatgccttgtttgaaatcctttttggaaaggatttctttctccagcttaacacaaaagccgcaccaggacgttcccgtgaaaagaagaacaatgggaaggccggtttccgccgcctgcttttgagcgcttttcaggctcttgccccagcggaatttcactttcgccgccttggcggccttggctgcggcttccttgtccgtgggaacgctttgagccatggaaatgccggaaacgctgaatcccagcacagtacacaatgcaaaaataaaatgtctgttcatcatactctgtgaaacgttcctctcagactagcagaaatactttgtataggaagagaaatcggtgtctttttcctagaaggaacgcttccgtcccctgtccccaaaatgaggcgttctcaaaaaaagtattgctctttcctccttaatcgggtaataatccgcccgcacttacaaacgcgcggttagctcagtggtagagcaacaccttgacatggtggaggtcgtaggttcaaatcctataccgcgtaccatttttcttaaaaccccgttcctttccggacggggtttttcattgcctccctccagttaatagatatagcatcttcttttccccgtaacaggctcaattgaaaaatgccggcataaagagacggttaatgcaaaagtttgcgttgataagaaaaatacgggataatcctatctttactcacttacagtgaaagatataatgagtatttaacctcattggtctcccatacagggaaaaatgtttttccaactttttttgaacacaagccccttcccgggacgctaatggtaggagggcagcttaaggccccagcctttaccccctccttccctgatgaaacaatgactattaaaagcccggcggaaagcattccgccgggcttgctttttatgagactccaccggttaaaacgtccgggaaattaacgggtagtcaaacgatcatataactcattggcatatctatgattgggatggttcacattcatatacgcctcataaagaggatgggatggatccgattccatccgcatggcttcctccgcgggggaaggcgccgcatttcctgtatgatggagaggagcttcatcaagcaggcgtgatgcctggtacaacaggcggattgcatccggattggaaccgagtcccggattatccagtaaagcgtccgcatccacccctgtttcagaggcaagccgccgaagaacggcagcagccctgcccatgttgcgttcataattagaaccccattcctgctgaagggattgttccgcctgcatttccatctccatccgggcatcttccatgtgctcacgggcctcgttatatgcctgggccattgtctcctgaagagcattcattgcctccggcggtactccgtaacgataggccgtgcgggccatacgctctgccagcccggcattccattcgctttccggcgtggattcaggacgttccagacggtattcttcctccgactccggcaatccggccagccggcggaatcgcgccatctgttcttcattctccacaccgggataacgtcgcaggcgttccagctccgcgtaactcttcgccagagcctccggcgtcttaaacttggaaagagatttctccatccctttcaactcatcaaaccgggcgtaccaatccggagcaaaacctccgtcctcacccagaaggggaggaaaaggttcagtttgaactgcggtttcggacagcgcgtccgtctccggggaaacggccccggaaccctccgcatccctgataggagcggccatgctgttatcaatggaatcaatcatttttctcttcttctgtagtttctttaatggctaattgaagctggcggcggatgtacagaaagatctccctgtaggcatccctcctcatggcatccagaggatcgtaattccccggacttccttgaaaaacgggcaaatcagtctggaaacgggcttccagaaaggaaagagtctcacgcccgtccggggtgtcaaacacccggagaagctggcgccttttgaaacgggcctcccggacggaggcctcctgctgcaatgtcgtatcctggttcatttctgaatcgcggttaactggtcaagcaagggattgagggaagcataaggatcctcttccgccggagccagggaggctccctgctggaggtccgcccgttccttccgcatggcacggacatcggcccagggcctcagcatgctctccggggcgccgtccacacgggcggacaggcggaaacagtggtcccagtccacatgatccgccaaatccggggcagcctgcatcatcatattcagccgctgaaggctgcggtccatcccttcactctgcaagcgcctgagcaccagggcaatctttgactgatagacaaccctgggttctcccacggcaacggagccgtccctccctaccctcaataccgcacggggtggcctgggaaacttgcccatccggaacagcagggaaaaaatgcgtgtcattgtggaatacagatcactcacaaacagcgtgaaggaaggagaaaacatcaagacgcgctcattctcccgcgccatgacctccgtggcagtcatattgccgcggtgcccgctccaaagctccagcatgggcagataataggcacggcgtatcgcatcctgcttctgtgccagacggtccatcccaacatcatacctgccctgcgtagcccattcccggggaaggtgaagggaagcggcctccggggtaatgacggtcctgccgccggcccgcaaatccacttccccaatctggttggcgagctccagaatacggggaaaggcggccacctcgccaagagtatccagaatacggttcaggaactgcacctgctggatggcgggaaacaccagcctgccgggagccagaccgtacgggccgctgccccacttcaaaaagcgggtcaccagataagggaactccatgtatcccccttcctccacaatcacctggtcgtccagagacaggtaaacgctttcaaacggcatgtgggaggcctgctccctgcggcggctgcgccgggtgcgcgggcgcacaacatgcagaaacctcagagttgtggcatacggattgcctccgcgctccagaacttcccgagccttgggccccagagctttcaccccgaacatggagcgtgcctgatgagccgtgtaggtaaactccctgacgtaggtatccacccggccttccgcattctccgcacaggcgaactgtccgcacggaatattggtaaacaacagccttccgtccgaggatgtgcccgtaaacaggcttccggtccccaaagccacccggtccagaaaacactcatggatctccgtataaaaattggaaacggacaattctttcagggcaatttccgaacactggttataccaggcctccgcctcgtcgcctccccggtcatccggagccgaccacttgaaccatacgtcatggctgggcgtaatataggacatatggccgctggccagcttctggcatgcctccacagccgtagtatccgtcatgcggtccatggcgtccctgttgggtagggaaacctccccttcccgattcaggcggcgaggcagcacgtaatccctcagacggtcccaccacgtttcccatggcgcgcgctgggcggccagggacttgtacacggaattcaattccgcagttctttcttccatggcagcacctatcccagagttttcctaagcagagtccgcggattgacctctccctgcccggcggaagaatgacggcgcgccagaatggtggaaatcattccctgcctctgccgttcccgggcctgataatcttcccctacttcttgttccacgctctccgccttgaccgggatggtctgctccggagcagaagcggaaggtgtggacggtttcataaatcccataatttcttttgctttctattcatggttgatactgattctccttcccttctgccggatataaggctccagaggatgccggacgcccgcctcacagacaatccatgcggcgggagcgttcttttcccatggaaggaaagggagctctctccacctgcccggacaatccgggcaagtgcttgcatttatcaaataaacaaatcggcaaaaaatgcacctgaggaaaaaccggacgcatacatgccattggtggcatcaaagaggtcgcctccaaacgtgatgcattccgcatccgtttcctccaaaacatagggcgctatgatcaatgaatccttacttcagccggatacgccatccgcgctggacatctgcaacgcggccctctccaaaataggggaggcacctctggacgcgctgattgccaatgaatccacggcatcccgcctttgcgttcttcattaccatccggcccgcagggaaaccctttgcatggcgcgctggaccttcgccgccacgcaaaccactctggactccgtttccgcacaggcgcccaattccctgaccccctatcaattcacgctgcccgcagactgcctgcgcgtgctggatgtggaatgctcggaatggaaaatgcagggacgccgcattcatgcttcctgcgccccgctgcccctaagctacattgccgatattgaaaacgccgaccaattcgatcccctcttcatggacgcactggccacccggctggcagaaaaactggccatgcccctgacgggcaaccaaagcctgcgccagaatcttaaccaggaattccataaaatcattcttccgcaggcggctaccgtcaatgcggtgcagtgcttttccaatgattcccacccgctgctggatttgctgagaaaaatcaaatcgccctcttgcccggaagaatgtgaataacatgagaataataagaaaataacataataataagttgtgaatacatgctcatgaaagcactggatttcatacagatatttgcctccaacgtccgcaggctggacttccgcctcagcagtgcccaggtcatcctggccgtcattgccgggtacaggcgccacagcaccattacggaagctacacgcctgcaccccaataccgtcaccaatatcctgcaggatctcattgcgcagggatacgtcaaccgtattggagacagccgcccttatgtttaccggcccactgcggatggagaacagcttgccggaaacctgctggacaaaaatacattccccggcacatgaacaatcccctgctcagtacagaagaaaaacgccgctggctggcccgcgttttccgggacgaggacggagaatactctcaggcggacaaattcaaggcgctggtggaagacaccaaactggcggcccttcagcaggaagaggaggaattcaaacgccagcgggaaataggcgccgcaccgcaggaccccatcctggctctgctccaggccattcctcctgcggagctcaacctgcatcagcaccccctttctgaaaaataaatagaggaattaactgacaagccttccagattcaaaaatcctggatttttttggaaattggattctttaaggagttggaacgtagcaacactttgtagaaaaattatcaagcattgtggaaaaacgcccttgaccacctctcctgtgctatgtctgcaacattgttgccatccccttgcaagaggacaacaggccgccccagcccaccgcctcgtcgtcctcttcatgcactctgcaaggagtgcgacgggcggaaacccgcaaataacaatcaccattcaggtttcaatccacgcactccttgcagagtgcgactacaggcggcgatgtgtgatgtgctgaggcttccgtttcaatccacgcgcactccttgcggagtgcgacctagggctaatttttcttcttctggcgtttcatagtttcaatccacgcactccttgcggagtgcgacggattggagcttatgacgttatgcttatttcatcgtttcaatccacgcactccttgcggagtgcgacaagcccccacacaacaaacaacaataaaccaatagtttcaatccacgcactccttgcggagtgcgacatcagattgcggctcatacagggttttctgtgaagtttcaatccacgcactccttgcggagtgcgactccccggtctccgttgcacccccggataccggggtttcaatccacgcactccttgcggagtgcgacagcgcgtacacgggcgcaagtcatgagtatgcgcggggtttcaatccacgcactccttgcggagtgcgacaggctggcagatcagccagttgaccggccaggccgtttcaatccacgcactccttgcggagtgcgactaggaaccacaatcggacttgcacacgcatgcgagtttcaatccacgcactccttgcggagtgcgacaagccacttgccgccgttgccgtgtattgagccgtttcaatccacgcactccttgcggagtgcgaccctcaatgtaagcgaaaaggcccgccccctcgtagtttcaatccacgcactccttgcggagtgcgaccaccgtattctttcgtgccgttgcccgtaccgcggtttcaatccacgcactccttgcggagtgcgacagcagtattgacgatgccacactttttttgcccggtttcaatccacgcactccttgcggagtgcgacagcagtattgacgatgccacactttttttgcccggtttcaatccacgcactccttgcggagtgcgacgttacttcgtcaaggcaatcaatagctcggcggggtttcaatccacgcactccttgcggagtgcgactggattccttggtatccgggggtgccgggggttgtttcaatccacgcactccttgcggagtgcgacaatccgcgtcaaatacgaggactgcccgcatatcgtttcaatccacgcactccttgcggagtgcgacggcatggcgggctctcgcccgcgccatcgaagagtttcaatccacgcactccttgcggagtgcgacccgacgccctcgtcatggcctggcacgcgcgacggtttcaatccacgcactccttgcggagtgcgacagcatacaggcccgcatcctcgtaaaagtccggggtttcaatccacgcactccttgcggagtgcgacggttttatagggcggcgtagttattcagcgtctagtttcaatccacgcactccttgcggagtgcgactgacacaatcgtaagttcctaattcttaaagggtgtttcaatccacgcactccttgcggagtgcgacccaaatcctcaagggcgggggcaacgtcaaagtggtttcaatccacgcactccttgcggagtgcgacttagttttcctttcttttagtttattgttgcgggggtttcaatccacgcactccttgcggagtgcgactgatgactatttccgagggtccggcaacggcacagtttcaatccacgcactccttgcggagtgcgaccttcagattcttctgtccagcgcacccggttaatgtttcaatccacgcactccttgcggagtgcgaccttcagattcttctgtccagcgcacccggttaatgtttcaatccacgcactccttgcggagtgcgaccttcagattcttctgtccagcgcacccggttaatgtttcaatccacgcactccttgcggagtgcgacgtttttcgtccaccgctactacctcacacccgctgtttcaatccacgcactccttgcggagtgcgactgttttttctcttaggagctttcctccctttgatgtttcaatccacgcactccttgcggagtgcgaccatatcgaggcgctggaagacgcctggaacaccggtttcaatccacgcactccttgcggagtgcgacttgtcactagttccccggtgggatagataacggcggtttcaatccacgcactccttgcggagtgcgacatgacacaatcgtaacccgttggtttttagagaggtttcaatccacgcactccttgcggagtgcgacatccgattgcggttcctatcgtgacttttgcgatgtttcaatccacgcactccttgcggagtgcgacgcaaccgactttatacattactactcaacagagcaaatcatactttgcgccaacctccctaaaaagaccgtcattgcacggttacactttctgagtatttatctgtcaatcttctattctcaatgcattacaccaatcgccgacctgccggggaattcgtgtgagcttgaggttggcgcacaggccatgttccacagtctttaaataatcaagggaccggagatgtcatagcttttctccttacccaattgttctattttatgatgccaattggaccccatatgataaattctgagactgtcactctcgttatcaataatcttaagcagcttgttcctaatgtcaaccaattgggcaggagtcaattcacattcaaatacggaattctgcactctctgtccgacattttcacaggctcgggcaacttgccgcaaccgccgctgcccggccttatcatccgtagctacatcatacgtaatgagaatatacatgacaacagctcgttttacttgccgatgaacggagggtagcaatccagatccccacgcaaatggcgtgccaacaaaagggcctgaatatgaatcagcaatcccaaggtggttttttcctgaagaaaaggatgcaccagaacggtctttttccgttcctgccaggcattcaatacttttttacgggaatcttccttcaaaaaaacggctccggactcttccttgtcaaaatcatctgaggatatctgcttgcggttaatcagggtaagggctaggcgatcagcgagaggtgcccggaattcctccatcaggtccaaagccattccgggacgccctgggcggtcacggtgcaaaaagcctgcggcggcatcaatgccggagctttcaagggcggacctggcgtcatggcacaacaaactgtatagaaaagataaaagagcattaaaacaatctttgggaggacgtctattgcggctttcaaacaccagctccggatcttccgtcctctggcaatgggacaagcaggaaaaataggtttccgctgcggaaccttcaatgccccgcaacatgtctccggaattgcatccacgggccatgcggcaaaaagctgccagacgatcgacctcctccgataaatctttcccgtacgttctctgcgcccttaaaagcaaactgcggcaattcgcaattttggctcctatcatttcccgggcaacgccaacccatcttgcctcatcatcagcccagcggtattgatcccggcgcaacaggatatttcccttcatgaagccctgtacgccagccagaaatttaccgtaaggattgcagaaggaaagcgtgatgccgcgttccgcacaggctcccatcaaataaggggaaactcctatgtcccaccccagcgtcacaataccctccaagttatggaggggaacccgcagcagacatgttccttccgcattgacttttacggtatcgccatccttggacagccagcatccttccagcgtcacaaacaatgtatttaaatgcttcttcataaatcatcggcttcacttgtttccaggctgtcttcaaacacactatccacccgggctttcatggtctgcctgtgctcccggcaaacgtcaggaagacagtcattgaccagggaacaggatttgcaatttttggaataaaaaggaagcggtgtaaccatgcctgtcaatacctctctggcatcacgaataacccgggcagtcagaaaacgcaattcctcatcaaatgacaccttaagcctacgctggtttttcccataaaaaagaaacccaaaaggcacttttatctcaaacatctcctccaggcacaatgcctgggcacacacctgaacttcatccgcacggtgcggtttgggtttacctactttgtattccacaggcgtcatggatactacgccgctccctttttgaacatagacggcttccaccacatctgcaataccatgaatcccccactgtacggaagaaatgtgcagagaacgcaatacccgttttctcccccggttttccgtcattccagaatcgacacgttcatgaaacacctttccctctgctgtgaactgattctcttcccagcaacattccagatggatcaacgcacactgcctgggacagtacaggtaatgctgcaatgccgccaaaggaacagagtatgggcaagaaacactcatagtgacagaaacaggcatctgagaaaaaacatcccataccttagcgacagactcaaccaataatgcaaaaaaataaatatatattgattttcccaacatatgtgcaacataatgcgacctatgaatgatgagaatccccctattgcccaccgtaaatggctggataatggaatctgcgtggatgaacctctctatacatgccccaacgataaggggaaaatccccgggcacctgaacatggttcggtattatgcgggccaattaatcaaggagttgcctgcatccctgcgcggagcgtggctctattgggttgaagccgccgcactctggcacgatttggggaaattttccctagaatttcagaaatatattaaagataaacaaatttctccacactcaacagaaacagtagagctgaacggcggaaaaaaagtagatcattccaccgctggagcaaaacatgccagcacccactggggcacatccaaagcatcatacggtgatatgctggcctatatcattgccggccatcatgcaggacttcccaatggccctgatctttttttcgaacgatttcataaaaaaattcctgattgggaatcctatgcccccgctgatttgtattcttttacagaaccgtcccctccacgtctctggcacgaaaaatcgcacactccggatcgtaatctgggttttgctgtagccatgcagatacgaatgcttttctcgttcctgacagatagtgattttttaggaacggaacacttcatgtgccaggaaaaacgggacatgaggccttcctggcctcaaaatatcctggcacaaatgagcctgaggcttgaagcgcatttgggcaacatggaaagtgctcggaatctcacccccattcaacgtctacggcgtgagatacaccatcaatgcctttcccgggcccaagtccctcaggggatttaccagctcaatgtccctacaggcggaggaaaaaccctttcttctctcagctttgcacttgcccatgcgcagcactgccacatgagccgtgtaatttacgtgataccctttaccagcattattgaccaaacagcaaaaacgttcagggaaatcatggccccactggatgaaaaattcggaatggaatgcgtattggagcatcactccaacctagcggcagataaagatacggaaagagtaagattgatgtcggaaaactgggatgcgcctctcatcgttactaccagcgtccaattttttgaatctttgttttccaacaagccatccgtttgtagaaagttgcacaacattaccaattccgtcattatttttgatgaggctcaaaaccttccttcacacttattggccccatgcctggaagccatgaaaaccctagaaaaagattacggatgtaccctggtgctttgcacagccacccagccgactctggaacacaagaaggaattccccataggatggccagccggagaacttaccagtctgctcggaaacgacttcgaacgccgactggaaaacgccatgcagcgtgtaaccatacagcatctgggcagaatggatcaaaatgcccttatcaggcattggaatacactcccggatcaatccgctctattcattgtcaacacgaccagggaagcccagttcctgtttgacgctttttcttcccagtccgcctcccatattctccacctgtccgccagactgtgcccgattcaccgggaaaaagtcattcaaactgccaaacagaaactggagcagggaaaaaacattattcttatcgccacgagagttattgaagcaggcatagatatttcctttcctacagtttatagagcttgtgcaggaattgattccatcgcccaggctgccggccgctgcaaccgacatggtgaaagagaaggaaaagggcttgtcttcgtctatgaatccacagactttcctcttcccgatattttggatgacctccgggcatccgcctccgcaactcgggagattttggctcaagaaccggaagcagcccttctttcccctgaaatttccaatcgttttttcaggatttattacaataaccgtaaaaatcaaactaatttatgggatagtaaaaatattagggaaatggctctactgaaccccgtatctgaaaaagtattcaaatccctcagattcaaagatattaataaaagtttcaaaatgatccctgatgcgtcgcattccgtgatgatcactattgatccggaggcttgccacatcagggaacgtctgaagattctggattcccaaggactttaccccaacaaaagcctgcggcgtgaaattcagcgttatagtgtacaaatatatgatcgagaatgggttgccttacagaaacatggaatggagtcatacattgacggcaccattaatattctgcatccctccccgtcagtttacgatgaacataaaggaattttatccttgcaacaaagcgatccggcgtatataggtttcatttgttaaccatgactgaaactggaattttattacatgtttggggagaatgggcctgttttaccagaccggaattaaaggcagaaaggtactcctatgaagtcatgaccccatcagcagccataggcattttaagcgccatttattggaaaccggaaattcggtggcatattgataaaatacatgtattaaaaccaataaaactggtttccattcggagaaatgaagtctcggccaaagcaactcctcccaaatccgacgtcatcaaaaacggaggggaagcccgcttggggcttctggtagaggaaacccggcagcagcgttcctctaccatcctgcaagatgtggactatcttattgaggcccatttttccgtccttaaagaacaggagaacattaacacccaagccaagcattatgaaatgttcaaacgaagggccatgaaaggacagtcttttcatcaaccttactttggaacaagggaattccccgtttcctttgaatggtgggatcagtcaacgcccccgccttcttcactgcctccggaccagcaaaaccggaacctgggcatgatgctccatgaagtagaattcgttcctgataaaaaagggaaaatcatcagctcccttgatggaaagaaactttctgccgtgccccatttttttccggctgaactgaagtccgggatcctgcatgtaccatccctaaaccgaaccaattcctgatatgatcattccggcattaacccagctttatgacagactgtcccaggatccggaggtgatggaaaaaggagatttgccgacgatgggaaaaagccgtcagaaaatttctttccgcatcatcctgaagcccgatggaacccttgtaagcatggatgacatccgggccatagacaaaccattagggaaaaaggtggcaaaaccccattccattcccattcttgtcctgggggccaacaaatcttccggttcaggcttaaacccctgttttttatgggataactgcggatatttgctgggttataagggtgtaacagaagaaaaagaaaagaagcgcatccgggaagcattttccagctttagagacaaacatcttgccgtggaaagctccgtcaaccatcctcatttttctgcggtatgccgttttctggaacaatgggatcccgacctgacgccttccctgctgccctctcccgatctgtggatatccaacggtatcttccgtatcacgggagaaatgcatgatgttcatgaaatcccggaaatccagaaatggtggttccatagaggagcagaggaatggcagggcagcaaaaaagaaaaggcacaagggatttgcctcgtttccggcaaagaagaacccttggctcttctacacgaacctgccattaaggggataccaggcgcccaggtttcaggagccaaaatagtatcattcaattgcgcctcctttacctcttatggcaaggaacagagtctcaacgcacctgtaggagaaaacacggctttttcctattgcaatgcccttaactacctgctctcccattcccaatacaacacgcgcctgggggacactactgtggttttctgggcagatgcccccagggaaaccatggatatggaagcatttctttttggatctgtgacggcagataagcctctgcctcctgccgttgatcgcaccacattggacaaaatatctaaaattacgaatttattacggaaaggagaactttcaaaaagcaaactggatgatgcggacgttcctttcttcatactgggtatttccccaaatgcttcccgccttttcatccgtttctggaatcaatcgactttcggaaaattgatggaaaatatccaggctcattaccgggatatttctttggctcgtcagtggacggaagaaaacagtaaacatccggatccggaattaccgaaaccttatgatatcttaaaagaaactgtcagggatgcgaaagaaatcccttctctatacagcggggtattgatgaaatccattctcttccgtttgccctatccggacatcatcgcccaggccattatcagacgttgccgcattgataagaaaatcaattatatccgttgctccttcctcaaggggtggctttacagaaaaacaaacaatcatgaccttaccaccatgcagacaattaatccagacaaccacaacatcggatacttgctgggtaggctctttgccatctatgtaaaaacccaggaagacgccctggggcataacctcaaccgcacgattcgcgattcctatttttccagcatgtcagcacacccccgttccgttcttcctaccatcaacaaactataccaacatcatctgcggctgattaagcaaaaccatggagagggcgccaaaatcaaccgggaaaaactggttcaggaaatcaaatctcatatgccggatatacctccagcacatctggggctggaacaacaagcctattttgatttagggttctatcaccagatgaatgatttttttacctccaaagataaagaagcttcctgaataacaatcaaccaaactataacaacaatgaataaaattgactttctcattctgtttgacgtgactgatgcaaatccgaacggagatccagatgcgggaaacctgccgcgcatggatgcagaatctggccatggactgatcacagatgtatgtttgaaacgcaaggttcgcaacttcatccaattaaccagggacggagaacccagttacgaaatttatgttaaagaaaaagccatcctgaacaatcaacaaagccgggcctatcaagctctggatatcaaccagaaggatgccaaacaggcggattatgataaggcaaaatcctggatgtgccaaacatttttcgacatacgcacctttggggccgtcatgaccacaggtgttaattgcggacaagtgagaggacccatccagatatcctttgcacgttccattgatcccgtctcaacctcggaatttgcagtgacacgatgtgctgtgacaacggaagcggaagccatcaagcaaaagggagacaatcgcaccatgggaagaaaattcaccctcccctatgctttgtacaaaacccaaggatgtttgaatcctttcctggccaagcaaaccggattctcggaaaaagactggaacatcttccaagatgcacttgtacacctgtttgattttgatgcgtctgccgcccggccttccggttccatggccattcgcaaaattgttctgttcaaacatgacagcgaactaggaaatgccccggcacataaattatttgatgccgtatccgttatcaaacatgaaaacgtagaatttcccagatccatcaaggactacgatattatcgttaaccgtgccttgattccgagtggaattacgattgaagaaattgattgttaacgaatttaaatctctgaaactgacagaggcaccttccgcggctgtgggaggtgcctctacgcattattaacgtccatccaagtcgtgtctatacgttcaacaagaatgcacccttaataaactaaaattaaaaacatttcccatttcataagatcatattttttcacgatccattctataagggcaaacttctacagcttcacctataaggaaacaatatactgaacaaccaccaatgacgagataagggaaaagctctccataaccataaggggcagaagaaacatatctcaaatgggataaaaacgactctcacaaatttccaaatacctcttacggatattgatgagtaccacttctttcgtctcccctttctttttcgacgtaaaaataatgtttttcaagatatttcatgattttccaagcattagagattgatcacagtccaaactgcctagaacagcatagtaattattttggaacctctatattaattttattcctgctctccgccgatcagcatatgagtatgcagaaaccgtagcgacccaaactaatctaccactcttgcagaattttcttcccaagaagaaaggaaaaagcatgaattccaaatataaaaaaataaatcataactcccaaaattaaaaaagaaatatttcctctggttttgttggattcctaaccgttgaaaaattcccacagggcttggcggcggcgggaaaattggatagggaatctttccccggaacccctcctattcttctttcagcggcaaggaacactaaaagtattgatttccaaggaccacccgggcaaaaaatatctgcggtttacatgatgcttttgcgcgtccacctgttcaggctcaacagccataccaacgccgcggagacagcggaggccagacaggccatcaacggaatttttacggcggagggcagccttcccagcccgatgaagttcacgaagtcataggagcactggacaaagaagaagtggcacagatacacgccgaaagtaagcgccgccaccttgctcagcactggaccagccttgattctgagccggctgacgatggtaaagatggcaaaggtcatcagaaatacattgattccggagaaataccagagcacttccagcttggaatattgaccggggaagtgcttctgcgtttccagaaagccgaagaacgtaacggcaaaaccaatcaaaaagaggggaatagtaatggacagcgtttttttccaactccaggccagcgggtatttggtcaggtaatgcgccagcaccatgtatcccaggaatccggaaaagttataaaacataccatacggattccaatcgcaaacacccagaatacccatattgccgtaattgccctcataccccagtgccggagcaagcatctggatgtaggggagagtcatgctgaatatccagatgcccaggaagattttcacatccttcctcctggcttgcgtcagccacgcgctcatgatgggcatgaagaggtacaggcccaccagcatgtatacgtaccacaggggcgtggtatcataattgaagttgaagaagaaggtatacagcttgccgacggtggcgctccatgtataagtgtccatcacgatattggggctggccgtttgaacgcctgcggcaaagtatccgaagtagagcaagggaagcgccagtgaccagacaatgagcggaaccagcaccctcttgaggcgcctggagtaaaaagcgcccatttccaaggtgacgggaaagagcaacactccggagatcatggcaaacaaaggcacgcacggccgtaccagacttccccagaagacagcggatttaaagttgaaggaaccgtcaaaacttccaacgaacggatcacagcaatgggccaggacaacgaggaagcaggccaggatacgcagagaatccacccaggcgatgtggctgccgcgggaattcaatgattggttggtgttcatggttacgtggaaaaaacagcgccgcgtcatcgcaaacgttcctgataatatacccgtttcccggaaacgttctatcattaaatggagaaaagaagcaaaaagcacccaatccctcccccggcaacaggggaaagctcttcgggaaagcctgcgcttcctgcagacttccacgcctcttcctccataaggatcatggaaccttttcccgccccaccggaattgttcaccgtgaggcctggtgaaaattttctcattcggcgaagttcatatttcattcaacaggatactcctcttccctccttgcaagtgaaactttcccccctctcctttcggtgaagagctattccgaaacgaaagggaaacacccccaacacccatgttttccttttgaaccggcaggaggatttcccttcatttttatggctaagatacccggaagccgggattcaggccttccctacccttcacacgctgtctgttttaaaactgcccggcggcgggatgagattgccgtagcggtgaacggtttcggaaacagcctgttcccggaaataacccagcagctccaaccgcccattggcaagcacgggacggtccagtacttccacatcccgggcacgggcggcattggccagagcctcggaaatatctgttccacgcaggaaccgtacgccttgaagcgcttccggcatccggacgatcaattccgcttccgtttccaccgtcagggaagcatagtaaccatgcattttctgaatccaagggcggctcgtccctatgctcaggtgcaggagcaccccgcacagtttcgcccccagcagcagaatggcgacgttatcgtcggacatgttttccacacgggccagaattcccttcaccgggatatagcggaaggtattattttctccgtaaacacgggagggatcatgttccacgccgaattcctccatccaccacttggcctgggacccggccgcagaacggatgcgcttggcgcagtccggcagctcggaacacagtttttccaccagtccggagatacgttcacccggcgtacgcagcttttggggcagcgccttttcctcccaacttcccagcatggtaaggtagttgggacctccggccttggctccaggccccatggaggaatggttccacccaccgaacggctggcggcggacaatggcgccggtgatgacacggttgatgtacgcgttgcctacctgcactttagttttccacaaggcaatttcccgttcatccagggactgaaggccgccggtaaggccaaattcggagtcgttctggatgtcaatggcttcctccaggttttccgcacggatgattcccaataccggaccgaagcattccgtctgatggaaccagcttcccggtttcacccccagccggatgccgggagaccagaggcacgggttgtcttccgaaggttccggcttgagcagccattcctccccgggttccagctgcgtcagcgcacggagcagattcccttccggctccctgatgagcggcgtcaccacggagttgacttcccaggacccgcctaccttcaggctggcggcggcatccttcaactgacgcaaaaaggcgggattgtcataaacggaagcctccacaatagccacgctggcggcggaacacttctgtccggaatgaccgaaagcgcttttcaccaaatcctttacagcctgatccggatcagccgtagcggtgatgatcatggcatcctttccgctggtttcagccagcacatgcaggtcaggccgcagttcgcgcaacattttcccggtgcggaaggatcccgtcatgatcacgccgttcaagcgggggtccatcaaaaacttgcgggaaatttcattgcgcggcatcggcacgaattgaaggacgtttttaggcacaccggcgcgccagaacgcctgtacaatctgccaagccgtataaacggccagttcagacggtttgaacaccacggcatttcccgccatcagggcggcagctacaccgcccgtcggaatggcgaaggggaaattccagggagacattacgcaaatggtacccagcggggacatttccacgccgtcgttcattccgtcgcggtccaggccttccgcgtaatagcggcagaagtctatggcctcgctcacctccacatcagcctccgtgggagccttcccggcatccctcaccatggcagcaatagcttcccccctgattctggacagctcctgcgccgcccggtgcaggatttcagcgcgttcgccaatgcttttggacgcccaggaggaacgggccctgtccgccgtgaccaaggcatgttcaacctggtcaaagtccgcataagcgaatttataggaaacttcattatggcgggacggatcgcgccccacgccccacagattagtcgtaatttcctcaccatctataaccagagggatttcctcgccggatttttccttctccgcggcaatcatcccgttgatccattccgcattctgcctcagagaccagtccgtatcccgctcgttggcaaaggcatcccggtaatgtgaaggctgaatggggtccgcagcgcggttctgcgtgcggttgggtccgtacttcacctcatccttttcctgacaggccttcaaaaacctctttttctggacctcccagctccgggaccccggcgtcatgccgaagagatcatgcaggaagttctcctcactggtattttcatccagcctccgcaccaggtaggcaatggcgctgtgaaaatcttccttcagaaccacgggggcataaaggagcagaccgtccgccgcctggcggatgacccgcgcctgatggttcgccatcccttccagcatttcgaattccacctggtcacgcacgccttcccgctcacgcaacagcatggcataacacaaatcaaacaggttgtgggaagccacgccgaactgcacatatctggcattatccggcatgcagccgtaatggagcattctcttgtaattggcatccacctgggctttcgtgccatatggggcctgcgcccagccatgcatggaggcctccaccttctccatcgccaggttggcgcctttcaccaggcgtattttgatgcgcgctcccctctgctccacgcgttccttcgcccaggcgcacagcttcatttgctcctcccaggaatccggcaaataggcctggagcacaattcccgcctccagatgcatgaattcatcctccatcaacgtacgtttgaacgcttccgccgtcagatgaagatcacggtattcctccatatccagattcacgaacttgggctttctggaaccgtccggcaacgtcaccgcattggtaatggccgcccgatacaggatgcgcaggcgctcctgaatcaatttgacggtttcttcaaaggctaccagatgaatctggctgaaaatggctgaaatcttgacggaaatatagtcacagtccttgtctgtcagccggtccacgacctgctgaagacggtggtgcgcctcgctttcacccagaatggcctcccctaactggttgatgttcatccggatgccgcccttgcgcctgcggcgcaggtgggggcgcagttttccatcctcggcaggaagaatgacattggagctctcctttctcaactggctggtaatcacgggaatgaccacacccggaaattgagcggaaaatctcccccccatcttcatggcgaaacggtcggccgcagacaaataacggggaacgccatatccgtccagaagatagcggaacaactccgcgccccgcgccggagaagaaggacggaacacccgatccgccagcgccagcgtaaacgccttgcccgccggatcattcatcatgcgctccatttgctgcgcctgcctcttctctttccctctcatcccggcattcgactgctttaaaatggactccgccagttccacagccttggcggccagttgctggtcagtccattggcctcggcgagcctccgccatcatgtccgggatggatgaatctgtcataacggttcgaagactagccccggacaggggcaaaatcaagccaatttgcccggtccttcctgtggaaagaggaatcacggaagaaaacgcatcccttgattccgtgacggaagcaggggggccttcctgtccatttccggcaactcaggaaagacacatcaatcataccgcgcagccgccagacgggctcttctcagctcttccctgagctggtgcgcccgtctgccgcaaacgctggaacggttcatgtcccggacctcttccaaaaccgcaaccgcctggttgaaggcatcctcgctttccggagtgtgggcttcccggtacagaaccttttccagccgcacccagaggggatgcaccatggagagcagaattaactggcgctcctccacggataacgaggggtcatccgcgcaggcacgccatgcttccaggcatgttcgtatggaagaagctttgctggcccggaaagactcgccaagcaattcggccgttttcctgtttttctccagacgaagggccgcctcccgggcgttcagaaaagccggaaccgtacagttcaatttttccagacgcttcatggtgccaggataatcccggaaccaggcttccggaggcacctgttccagctcccggcaaatggcggaggcttctgccgcagggtccccgcccttcggaatatcattcacccgcgtcaccggccgcacgcgctgcgctttttccgcaagcagggacactttttcccgtagggaagctgcagaggaccctccttccaccaggtcgaatacacgtcccttggagtcaagaaaaaccacggaaggcagcatgcgcacaccatgcatcgccgcacgggacaggctgccgtcttcttcccaatccttcacggaaggatgtctgggaaccgtgacaaactgcacgtcacgcacatattcatccagcgcgcggcgttcttccgtgcccggctggagagctttcaaccaacgggcttccgctgaaccaggttcctctgaaccgtacacaaccagaacaggggagggaagggagggagccgcagaacaggagacggaaagggcatccatttccgcacgtcccggaaacgccagcgccaaaaacgcaatgaccgctaaagccctcatgaataaactgccatccatcagccctttctgatggtaatgcgcttgtaacggctgtccccttcttcggactccgtcacaattccttccatggactgaagggcattatgcaccaggcgacggtggtaggcattcaacggaggcatcttcatcggcttgccgctctcctggacgcgttcggccagggaacgggccttttccagcaaacgggcttcgttgcgctcccggtaatggtcgcaatccaccttcacgcggggagcatcttccatcttgcgctggatcatgcggttgaccagatactgaaggtcatccagcctgtccccgtcccctccaatgatgtactgtgaatccggggaggaaatattcaggcacacgatgccgtccgtttccgttacttcgatatccgcggaaaaccccagcgaagccagaaggctcttcaaactctgttcagctatttcttgcaccgtcattactttaaattaataggaaaagggttccataccggaaaaccgcctcgcgccggacggtgcgagccttttctccaatacccgattgacataaaaatcataacctatttattcccctcgtctatgaaaatttgtggaagctccgttccatatcatgtacgcaataccgtccctgccctgccttccggcaacacggttccgttcctccttcggaaccagatgcaggaaacaccgctcagaaaggaggcgactgttttctgccagcccgcggccgtaccccggttatctccgcttctccctgccgccaatgaaacatggaatacagacatccacagccatgccaatcaaaaaggcatctccgcacagcccgttctttattacataaaatcttaaataacagtttctataaaaaaattttcatcagctccggagaaatactgatgacaaaacaggacggaacatccccggaaaaagggaagtcgaactattacccacatagaaaaatccggtccctcatgaacaagccaatgaaaaaaaagaaaccgcccatggaagacagcgccgccccttttcccaatggaaaagaagctgctccccattatacggatacaattgatccggaattgatcaaacccactccaaaacctacgccgcccaatgcggaaccttccgcgcccggttccatgaagatgccggataacgctacggaaaaaatcagggagctggatgccatgcgctccaacggcatgggacaggccctcacaagcaacctgggagttaaaatatccgatgatcaaaacacacttaaagcaggaagcagaggcccctctctgcttgaagacttccactttctggagaaaatggctcattttgaccaggagcggataccggaacgcgtggttcacgcaagaggttccggggcacatggttattttcaggtgtacaaatccctttccaagtacaccaaagcggcttttttgcaggatccgggagaaaaaaccccggtctttgtgcgtttttccaccgtgcagggcttcagaggatctccggatacagtaagggatatccgcggttgggctaccaaattctataccaaggaaggcaactatgatctggtaggcaataacacgcccgtcttcttcattcaggatgccatcaaatttccggatttcgttcatgccgtcaaaccggaaccccacaatgaaatgccccaggggcagacggcccatgactctttctgggactacgtctccctgcagccggaaactctgcataacgtcatgtgggccatgtcggaccgcggcatccccagaagcttccgtacgatggaagggttcggcatccatacatacaaactggtcaatgaagaaggaaaaagcactttcgtccgtttccactggaaaccgctgtacgggaaaaaatccctggtgtgggatgaagcccaggtattgacaggacgcgatcctgacttccaccgcaaggatctctggcaatccattgaagccggagattatccggaatacgagctggggctgcaactcatcccggaagaagacgcagaccagttcgacttcgatattctggacgctaccaagctcattccggaagcactggttcccgtggaaatcgtcgggaaaatggtgctgaaccgcaacccggacaacttttttgcggaaacggaacaggtagccttctgccccgccaatatcgtgccgggcattgatttttcagacgatccgctgctccagggccgtattttctcttacagcgatacccagcggcaccggctgggaggagccaacttcacggaaattcccatcaaccgccccatttgccccttccacaacaatcagagggacggcttccaccgcatgcagatagacgcctcaccggccaactatgatcccaattccatcgggaacaactggccgagagaaacgcctccggagaaaggcggcttcactaccagcccccagacggtaagcggtgtcaaggaacgtttgcgaagcccctccttcgcggaatactattcccacccccggctgttctggatgagtcaaactccggtggaacaggagcacattatcaacgctttcagctttgagctgggtaaggtgacgcgcccctatatccgggaacgcgtggtggaccttctgacacgcattgatccggacctggcaagcggagtggcccgcaacctgggaattcaactcaccagggagcaactcagcagggaacttcctaggcccgtctgcggcctggaacaagatccgtcattgagcctgtatgcccatacggacggcaacctcaaaggccttcgcgtctctttactggcagcggacggcgtcagcctgaaatccgtgaaagaaatctgcgatgccctgcatgaagaaggcatccacccccaaatcattgccccgcacatgggaagcataacaacggaagaaggggaagagctgtttgttgacggaaccctgtccggcactccttccgtcctgtttgactccgtcatcgtcccggaaggggaacaaagcctcacaacgctcctgaaagacggagatgccaagtaccatttgcgccaggcctacaggcacttgaaggccatcggactgcccggcaacgccaaagccatgcttgaggcagcctccctgccccaggatatggatgacgccgggctgctcatgccgaaggacaccaagtccctgatgccccccttcatcacggccatgaaacagcaccgcgtctggagccgagaacctaaaacccttgatttcggagcctagattcgtttcttatacaggaaccgcttccatttacgggctgccccgccgaaaggtgcggcagccgtttttcactaaaaaatccgggggagttaaacaacacttcgggcaaattgaaaaagggagggagatacactcaaaacgggaacggaaaccggaatacagcatgatgataatgccttcttaaaagaaaaccccgcaagcctttaaacttgcagggtttattaatggtacacggagagggattcgaacccccgaccaactgtgtgtaagacagccgctctaccactgagctatccgtgcgtgaggtggaaggaatatataccgggaaagcaggcccggcaaggagaaaatgaaaaaaatgcgtcctcatttccctgttctccatgactgtaaaatccggacaccgcaaattccagaaaatggaaagaaggcagacaaggatttcctgtccctttccgggaatatgtttccgtattatttccggaacctgttcccctacctgacatctacgcgccggagcacgcggtaatgcaggataatgaagagaacgcacaatacggcttcgaaccaatagaacatgtctaacgcatcccgaccggaagtgaaaccgtaggaatgcagccctactccaagcatgttgacgccccaccaggcaaaggcaatgataacgccacccactacattgctgaagtggagcagccaggaagacagccatccggctttccggacatgcaatacggtcaattgccacagtacaatcatcaatgctccgttttccttgggatcccagccccagaaccgcccccaggattcattgccccaaatccccccaaaaaccgtccccaccagcgtaaacaccagggaaaaacacaagatgccgtaagccatgcggtccagggattgttccgtttttccactgatcaggcgcaggggggaagccagcaggtatatatgggagagcaccgccgccagcagcccggccgcgtaccccagcacaatggtaatgacatgggtggaaagcaggaagttggagcgcaggatggccaccaggggatccatatggtccacagcctgggaggcttcatacagaatacccatctgacaggagaaagccccaagcaaaagccccgccgccagtacgattccctttttactgaaaagttccaccacaagagcgcagagcactcccatgcaggcgatgaaggcaatggtttcatacgtgttgcccaccggggacctcatggtgatgagcatgcggatgaccagcgccgcggccagtactccggttccgcccgcgcctgtcagccacgccaggccgaaacctccgggccgaagaaaacgccgccagaggggagcgttggcggcagggcggaaaagcgcacagagcagcaggcacacgaacgccgccacaaaaacggccagggaaatataaagcggatccagacggtagtagaaaatttctctttccaggctgtgccgctctccggcggaggcagcttcattgggttgcgccagcttttccagcagcaggccttccgctttcatccgcagtgcggaagcctccgccccttccatgccgatagctttgcgttccagtagggacgccattgccaaaaaggctccggcagctttatccggggcagccgtccacaggcgttctccatcgcggccggcagaaggaaaccagcgtgggaattccatccgttccatggcggcagggttttccagcatgatccgggagacaagcatccatccccgcattacgtcaaagttgcgggaaagggacaaaatttccttctgggcttccgtcagattcgtttctcccaacaaacggatttcccggacggcacgggtcatttcctcccagcgttccgcaagctgcgcgtaggagtattttttacgcttgtctttctgatccggcagatgcaggcgcctgaccacctcttcccgattgaccaggaaaacagggtattgttccgccagttccggacgaaacatgcagtccagcatccattccaccggggagagcttccttttcccttccggcgtatcaacaacaaagcttcttttgcccagcgtccggagcagatggaaccccgcataagtagaaaccggcttcaggcggccgccgtcctggacggccatggccccggcccgttccaccaaagcgggagaccagggcacataatttttcaccagaacaggatgggcggcaggacgcgctgccagcatgccgacgccgaagattgccgctaccagcagacaaatgcctgccagacgcaaatgttttttcccgccgggggcggaagcggcctgcggttcagccgtcgccgccgttccggcagatgccagaccgggtttgcggcgcaggtatctgccaaaaacacaggcaaaatgccacagcaatcctatagcgatgatgtaggaggaccatttgggcatttgctccaggggattatgggaagcgcggagaatggagatgagcctgcccggatgcagggaatcctggccccagctcatctggtacagcgtccagccggaaaggcgcagaggctcgttcatgcggataacggcgtcatattgaccgccggattccgggaaaacggttatctgggattcataggatttaggcttggaagtccccggataaaactccggcacaaaacggttcaggcgcaaatcaaacggaagggaatattcatgcacccggtccccctggggcagttccacctgttccacggccaccgtcattttgttgcccagcatgataccggccagcagcagcaaaattcccccatgagccaccagcacgcccgcgtgcctccaggtccaccggatgcggaataccccgcctatgagcaggttggcgaacagcaggacacaggtaatgcccatgccgggcaaaggcagggaaatcagggagttctccccgcccagcggtatcagcacataagccgccccgaaaaaagactctatggcagcctccgcccccatggcagaagacagccgcacctggtgcagcgtcccggcaaaggtcagcaccagaaggatcagcatcagggcaatgcccaagccgtagcttccggcaaaattccagaggctgcgtccatattttttccataccgcatccgttcgttccctgtccatcagcgtaaggcgtccgtagtctaaaaagagggccgattgcacgatcagctcgtgaaaccggccccaatcatattcctggggaaaaggttattaaaagttgtccgccagttcttcaaagaatgcctggggatgtgcacaggccggacataccttgggggcagtggaaccggtatgtacataaccgcagttgcggcacttccactggatttccttctccttggcaaaaaccctgccttcgcgcacattttcagccagcttgaggtagcgggcttcatggtgctgctccacggaggcaatcttgcggaaagtttccgcaatggcggggaatccttccctgtccgctacttcggcaaacgcaggatacatgtcggaccattcgtcatgctcgccggcggctgcggccagcagacaatcctccgtagattccaggggagccgtgcagacggcgtgcgttacttcaacgcaagcgtctttcagcagtttgaaaaataccttggcatgttccttctcattgtcggccgtttccagaaagatagcggcaatctgttcgtaaccggccttcttggctacgccggcaaagtaggtgtagcggttgcgcgcttctgactccccggcaaaagccttgagaagattcttttctgtttctgttcctttgatggatttcataaattagtcatctggttgcgtaagcgaaagcatcctaataagacgccgtgaaaaaacaagcaaatattgaatgaatctaaaaaatagacatatccggaaaaacatacggcagtttccccatttgggaaaactgttgccatgcacgcttctgctgtcccccccatacgcgccggcagcaaaacggcatcccgggaaacaggcaggaacccgtaccgcaacatcaggcctaagcatgaaccggatcatttgacaccccttgtgtaaatagtaaaattaaacggaaaaaaaccttaagctccatccatgaattccgccaatacccccttattggaaaccgagagattaatactgagaaaattcacggaaaatgatctggaggccctgttcaacatttacagcaatgaagaggtaaacacgtatttgccgtggtttccattaacctccctggaagaagcggcgtccctgttcaaagaaaagtaccaggaagtgtacaaacggccttacgggtatcattacgccatctgcccgaaaaacagcaaccttccggcagggtatatccacgcaggcacggacgacagccatgacctcggctacggattgcttcaggagttctggaacagaggctttgccacggaggcggccagggctgttgtcgcccggttgaagaaagacggcatgccctacatcacggccacacacgatatcaggaatccccgcagcggaggcgtcatgaaacagctgggcatgcgctaccaatattcttatgaagagctgtggcaacctaaaaatattccggtcactttccgcatgtaccagttgaatctggatggacaggaggatcgggtttatcaggaatactggaacaggtcatccgtccgtttcaaagaaactggtatttgaattcccaatacccggcctcatcttcaggagctccttcccgccctgggaaacattgcggatacctccgcatccggttatctttccaccggttttccggagaaagtcctgctccacggttcttccagcctgtccggaacgctttccaactcccggagtattttctcccgctctcgggaaatccgctcctgatccgcagaggccggaacaggctgctccccgggcagaggcatcagcccgtccgccgtcctgccgccgtccggggcaatcggcggagcaacaaccttgctgtcttcatccgtttccggttcagggctgaccggcttctgctcatccatctttccggtactttccggaacagccaggttccgatacaggaacaccaggtcccccgcctccacagcgccgctgcggatatccgcaggaatgcgcgcacgccccattcgctcctccgtcacaatcaggttggcgactctgcatttttcttcccggcccggagattgggagataagcacggttcccggttcataaacattcccggccagagcaatcagcacataatgatgattaggatacacctgctccaccttgcccacatatacggggggagggactgctttcttaacgggctgctgcacctgctgggaacaggaggcccccagcaccacaaacgccgccagaacaggcagggaaacaattcgtctcatggggagttttttcatcgtttcattccaccagcaccttgcgtggacggttggtattatccgccggggcaataatgccgcgggattccagcaaatccatcatgcgcgctgcacggccgtatccaatgctcaaacgccgctgcagcagggaggtgcttaccttacgttccacaacagccacttccaggcacttggcatagcattcctcttccgcgtcatccagcggactgtccgcacctccgcgggaaggctcgtccagggacttctgaacctcttcatggaatttctgcttggcctgggaagcacagtgggccaccagggcttccacttcatcgtcagagataaaggctccctgcgcccgctccacctgggcggaacccggcggcaaatacagaaggtctcccttgcccaccagtttttccgccccctgcctgtccagaatcacacggctatccgtaccgctcgccacctggaaagcgatgcgcgtcgggatattggccttgatcgtccccgtcaccacctgccttcttggcgtctgcgtcgccacaataaggtggatgcctgcggcacgggccttttgggtaagacgtccaatattcgtttctatgtccgctcctactgtctgcatcaggtccgcaagttcgtcaataataatgacgatgtaggggaagcgttcaggaataactccgtcgtcctccagatccagttcatcatcttcttccacaggccattccccctgggattccaggtctctggcaatggattccgccaaagattcatccacctgcccgtcttccggttcctccgtctcttgcgcaggaacatccggcgggcgcttgttgaaagcttcaaagtttcgcacacccaccttggcaaagcaatgatagcggtgctccatttcattcacgcaccaacgcagggcattgggaactttcttgggatccgtcaccaccggaacaatcagatgcggcagcttggaataaggctgcatttccaccactttcggatccaccagaataagcctcagttcatccggacggaatttcaggagcatggaggaaataatgctgttaatgcacacggattttccggatccggtggcgccggccaccaacaggtgcggcatggacgccaagtccccgatcacggtacgtccatacacgtccttccccagcgccagcggaatctttttcttgggggaacaaaaagcgggatcctgcaaaagttcccgcaggggaacggccaccttcttccggttgacgatttcaatacctaccgtatccttgcccggaatgggggccacgatgttcacgctttccgccttggtcgccagcgcaatatccttcgcatactggtcaaaagtatttacgcgcacgccgcgcgcgggatacacttcataacgggtgatggtcgggcctcgggtaatatccccaggcgtcacgtccacgcggaatgtcgtcagagtatcaataatcttctgctgtatttccagcatttcttccttgtcctctgccgtagggccttccggcttttcttcataatgcagcagttcaaagggaggcagctcatactcgcggaattcctccgtgggaggagtggacaatttggaaaaaggctgctctttgggcgcgggcttcatttccgccggttccgcaacggtaatcctggggcgcggagccaggggaaggcggccctgggttcgcggggcgctgggaggcggaacagaatcctccggcttggacggagcaaccgccgctgcttcatgatacaaactttccagatcgtccccggtgcgctgcagacggggaacggaagcccggccctttctaaccggcctgggagcggacaaagcggcatcttccatgctggccctcacgcgggcagcttccctggcaagcagagcggtctgtcgcgccagttttttttccttcctgttcatacgccaggcacgccattcccgcagcatggcccggcaaaacggccggggacgcatcccggcggcataaaccaaggccagcaaatagcccagcccggaaaacgccagcacagcggatctcccggccaacggaagaaacagaccagttcccagcaaatggcccgccagccccccggcgccctgaatctggtggcgcgccacccattcattccccggcacatgcccggccgtcagaaacaggcatccgaacaacaacaggaacaaaccgccgtaaaccacgcttcggggcagccttccatggtggagcaggcggtaaagcccccaccactccaacaggataaccagcatccaggccatgcctcccagcatccaataaaaaattcctgcaccatataatcccgccgttcccagcacattggaggtacccggtataaccagcccggagccatttaaataactccagcctatttcccgcacatcaaatgtcagcatagcagccagaagagccaccccccccaacaaagacacggcaccccatgccattccaatccaaacaggggaacgcccctcttcatgctcaaatgcatgacgttcctgcatatccaatgccatacctgtttctattctagcaattcttcgccccaaactcaaggctaaacagggaagaaaaagaattgcccgaatccgcttccctcaaaacaggaattgccggcttacggaccggaaatacggtttttaaacacttttgccactctggaagagtatcgccaggaattcccttttttacctgagaaaagaccgcccctgcaccgcaaatcaataaaaccgaatcaatttcaatgattatttttcatatccatttgattatttattattagcctaaatatctattaaaaaaaatgtgccgttcgacattttttcatgagttatgaaacatccagcgaatttcaaatccgttacttactgaaatcagttgctgtttacctgctatttatgagaagaatcgcctctatttccatgttggctgtggtatccgcgctttccgcgagtgctgctactgtattatttgattttaacagttctctgcttccggaaactcctgccaagactgtttctgtaaccgattccggttcaggatttgttgcaaccctggctacggcatcctcttccgcgaatctgggttctgcttcttccgccgcttctggggactgggtttcctccggaacttcttttgatacacagggattggattctttcatggaaaaccagatttctttcggaaactcttggcagacctttatctccggccccaaaggatcttctctttccctgactatttccggtctggtggctggtgcttcctaccagattgcccttgttaccgggtgtccgtttgagggggccggtgcctggaattccctggtgacttccaatacctacgggcagcgcggatccttccataggtgcgaactctcagacaattcaggcccggactcccacggggtacaccattagtgacgttattgccaatgaagatggcgaaattattctgacggtgaatactccgggttccgcccacacgcctacgttcaatgctctggctatttccggagaaacagccagcgttccggaaccggccacggcgtccctgagcctgctggggctggtggccctgatggctcgccgccgaagagcttgagaatctcttttccggcagttaaaaatgttgttgcctgcaaggttctgccttgcaggcaattttttgtaatcatccgatttgagaaaactgggccgtccgggtgaccgttttttcctggcggaactcttgctccggaggaaataaggctcctgcttctttgacattgcgggaacgttcttcatccgttactctttgctccgccgtggagagaaattatcatcattgcgtggaacgcaacagggaattgattccgccggatacggatatgttccgggtcatggacggggcaggggatggaatccccggtgtctttgtggatcagatggcggatcgtattctcgtttccacacgcggctgttccattcctgcagacctggaaagcgaactccgggatacgggcatgcccgtatcccataaaaaactggaacgaaaccaaaaagagacgttctggacatcttggttttctgtggcggtgttattcccgtccgggactatgacttcctgaaggaaaacggagttgtggctatcttcggcccgggtatcaacattccggaagcttccaggggaatcgtggaagctcttaacgaacagtatgctgaataagtataaatcgttgttggtcaatgtaatgacctgtgagaaaccggatgaaaaattcggactctttttttgcgggcggattaactatccgctgtcaaactatttttttaaaaaaaaggaatttacgcagattcacaggcggaaaaaacagattggcaaatcatagagaatatctgtgaatgttttttggccgagcttatttcaaatttcatgatatataataaatataatttgattttcaatcaattatgacatttacccatcattgtgcgaggacattgtgcaatacatggttttttccagcggatagttaatccgctaattgagaatgctcttcctcatggcattgaaattacaatccgttaaccagtcacgactttcatgtgcaggcaagtcagcggccactccccggcattttacccggcggtactgcttctgccagtatcttttcattattgatgattattttcccgatttttccatgtgaggggaaatatatccccctttttcaaacccttgcttgtttcaaacaaaaaaaaatcaaaatcatcaaatttaaaatgatgactgaacatatagcggcctttttctttcaaacttccggaagattaaaagcatggagggcatcacgccattcccgtggtgcttccgggccaaggaagaaaatcctttgagccggaatggcctctttccctgtttttatcgccatctttcctcccaaaagcaacgtttcctcctccctcaccaaatgaatacaaacaacctcatcaataaagtcattctgtgctccctggccatggccggagccgctctcctgccctcctgcgtcagccccaaggaagtcctctatatccaggatgtttccggaaactccagggaaaccatcaaggcaaactaccagacaaccatccagaaggatgaccaactctatatcgcagtcagcagcaagcagccggagctcaccgccccctttgccatgtctgaaatcggttcctccagcggcacctccagtaacaaacccaaaggatatttggtggatgcccagggctgcatcgtcctgcccgtcatcggcaaaatgaaggctgcgggcaaaacctgctcccagctggcctccgacattgccgctactctcaagaacaatgactacatccgggatgcctccgtcaatgttcagatcatgaacttcaaattctccgttctgggcgaagtcaatgctcccggaacctacactattgaaggacagcgcgtaaccattcttgaggccatcagccgggccggagaccttaatattgacggcaaccgggacgtcacgctaatccgggaaaccaacggaacccgccaaatcgccagtatcgacctgcgcagcaaggatttgttcacttctccttattattacatccagcaaaacgacatcatttacgtgacaccctcagaccgcaaggtcaacacgcgcagcgacgctgctcaatggtacggctggggcctctccgggcttggtgtcactctggccgtgatcgccctgtgcctgtaacggacattccgcctctttctcatccggcttaatcatacctgtgaacggaaatatagggacggtccgattgcatcggaccgcttccccaggggtccagtatttccaaacaacattccaccctctttcctccatggcaaataataccgctcccactccgcctgttacggaaaacacagaagaaacaacttccttggacacggtgctgctcgtcctgcgccgctactggtttatcatcattctggcagccctcgccggaggtacggcggcttactacctagccggccgacagaattacatttaccagaagacggccagcgtcctgatgcgcgatgccaaaacgagcagtgacgcatcttcggaacgcattatggcagagctgggcatcgattccggcgcagccaacctggccaacgaaagcttcatcctcaaatccaccgcattaatgaaaaaagtggtggaagacctcaatctcaacacttcctattggcaaaaaaaagatttcagggaaatcgacctctacaaaaccagccccctgctggtccattttgaacggatcgataagcaacgagcctgtaccctgcagatcacgcctctagatgaaaagaggttcatgcttagccattccaataaccagggggaatcagtccagctggaagggttttacggaaaacctcttacacttccctttgccgtcatttccatccatccaacatccctgatgaccgatgcgtggaatgaaaaaactgtcattgtccggcacaagcccgtgcttgaaactgctaacaacctgctccacggactgacagtcacccgtccggacgccaaagaatccagccttctggaaatgtccctgacggccagtaatccccagaaagcggaagacgtccttaaccacctcatccaggtttacaaccaaatttccaaggatgaacgaaacaaggcggcccttaaaacggaaaacttcatccagagccgcctgaaagaactcggagccgccctgagtgacgtggacaaaaagatcaccgaattcaagacgaaaagcgacattgtcaaggatacggataccaccatgagcgcggacttcagcacgtcccaggcgctggaaaaagaaattttcgatctcgaaacacaaatcaaactggcagccatcctggcagacaatcttaaggaaaccgaacgcaaacagggcctgatttccgtggaaaccggacttcccgattccggtattgcccggcagatagaacactataacgaagcctatctggaatatcagaaaattgcaggaagcgccggttcccagaacccaattacagtgagcttgcgcgacaggatgaattccaccagggcggccgccaacaaagctctttccaactaccgtagcaatttgaatctcaagctcaaccagctcatcagcaaacgggattcccttactgaacgactcacggagacagcaagcagggaacaggaaatcattcccctggtccgcgaacacaaggttaaggaggaactttacctgatgctcttaagcaaggaacaggaaaacgccctggctatggcggtaacggaatccagcgcccgggttctggaaaccgcccatgggcccaactttcccatttccccaaaaaccattcaatacatcgcgggaggaacggcgggaggtgccctgttcagcatatttgccttcatgggagcggccatgttgaacaacaaggttaacaataaacacgatctcccgtccacaaacaggcagcctgtcattgccgaactgccccagatgaacaaaaaagaaagtagaaataccggtcttttcattcaggacgaacattccgtcatcgcggaatgcttccacatcctgcgcaataacgtagattccatgctccccagaccggaacagggaggacacgtcattctggttacctctaccctccccggagaagggaaaaccttcacctccgccaatctggccgcagctttcgcctatgccggcaaaaaagtactgcttattgacggagatttccgcaaatcctccctgacccggcgtctcggcggttccggacgcaaaggactcacttccattctgctccaacagagctccgacaccaccggcatcattcgccccctaagggaaaactcccgcggaatggatatcctttacaccggccccatggtgcccaatccggttaccctgctcagtcatcctctgctgggtcaaatcctgggcatcctgaaaaaacaatatgacgccgttatcatcgacgctccgccctacggcattctggcagacaccgccattctggcatccctgagcgatattaccctgtacgccgtgcgcagcggaaaaatcgacaaacggtatctgctccaaatccagcaactggccgatcagggaaaacttcccaatatggcgtacatcatcaacggcgtcaacttcaagtcctccagttacagctactatggctacggatacggttaccaatacggatacggctccggagaaccacggcaaaccaccaggaaacaagattaataagacacaggcaatgcataagcccaaggctttcttccctgctctttactcttttcggcagcaatcatgttcggcaacctgttcactccccggtatgcgacatccagcctctttccggacggcatggacatgcacacccatattctatggggagttgacgacggagccgcctgccttgaagaaagcctgggaatcattcgccggctcaaggccatgggactcaaaggagcttactgcaccccccatatcatggcgcgctacccggacaatacgcccgatttcctgcgccgccgttttgaccagttgcttgccgacaccagggaagaacaattccagctccggctcgcggcggaatacatgctggacaaccagttcaatgagcagctgcgccgatacactcccctgacctacgacggaatccacctgctggtggaactgccccagtactaccttcctggcgcctggaaggacatgatcagctccgtccgggacaaaggctatacccctgtcctggcgcaccctgaacgctatggccgcctcctgcaacaggaagatttcctccaactggcccggcaggaaggcgtcaaatatcagggcaatgtcggctccctgaaaggattttacggcaaatccgccgcagccctggcacaaacgttccgcacccgtcaactttacgaatggtgggggacagacagccacaacatcgccatggccaaacgcatgcctctgaaaaactaactccgcctaccctattaacaacctctcgtactacacccatgtcagcccctataactaatatccccttcagcaacccgctgtatcgtaatcataatttttacagacgctacggaaaacgcgccctggatttcacgggtgcactcttcggccttatatgcctgtttccggtattagccattctggctattctgctggccatcgtccagcggacatctcccttcttcctgcaaaagcgcatcgggcacggcctcaaaccctttcatatcatcaaattcaaaaccatgaaagacaccagggacaaagaagggaacctgctcccggatgaagaacgcacaacagtcttgggctccctgctgcgcagcacctccttggacgaactgcctgaactcatcaacgttctgttgggggacatgagctttatcggcccacgcccctggattcccgatcaaatggccatttttaccccttccacccggaaaaaaagaatgtccctgcgcccgggcatcacggggctggcccagattcgcgggcgcaacaacctcaccttccgtcagcgggtatgttatgacctgagctaccaacgccacctgaccttccggtacgacctgaatatccttttttacaccttcctcaaggttgtcgagagagaaggtattcagcagcgtccggatgccctgagtacaccggcccgtgtactgaagcccagagatttgatgacctacggattgaaagaaaatacgcaactcattttaagaagtatccgaaaagaacctgtcccctccttgagcgtacccgcccatcccttgatccccaaagacttgcctaccaaaggtctcagggcaaatacccagcttatcatgaggagccatcagaaaagcatccaataaatttcctccactcccccccgccaaaaatgaaaatttcagtcattacggtttgttataacagcattgcaacactgcaagacacgctggaaagcattctgcggcaaacctacccggacgtggaaagcattgtggtggacggggccagcaaggacggaaccgtggaattgattgaaaaatacagtcatcaattttccggccgcatgaaatggctatccgagccggacaagggaatttatgatgccatgaacaaggggataggcatggccacaggagatgtcatcggttttctgaatgcggatgactattaccaggacgaaaatgtactgaaagccatcgccagggcatttgcctggcatggaacagatgccgtacacggtaatctgcactacatcaacggagtaagggacaccgtacgcacatggcgcggaacggaatacaatcctggatccttccagcgcggctggagcccggcacaccccacattctattgtaaaaagggctgctttatccgttacggcggctttgacccctctatcggcagtgcggcggattttgagctgatgctgcgttttatagaaaaaaaccggatctccaccacttatatcgaccgcgacatggtattcatgcgcactggcggctccagcacatcgggtctgcgcgccatcttgcggaatacgcgccagaacaaacaggcattcagaaaaaacaacctcccttacccgtggcattatgacatatcccgcatattccataaaatcctgtccttaaagagcccgttcctatactttatggaaaagaaataactggaaatcaaccaaacttcttctccaatcataaaaaacggcctatgaataacctgaaacagaatgctcaaaccgcagtcaaatggagtgctattctcacatttggcaaccaatgcgtaagttttctcattagtgttattctggcacgtttgctgactccgtcagactatggcctagtaggaactataagtatctttatagaaatttcgggcatttttgtaaccggaggactcagcatggcacttatcagaaaaatagaccggactcaaacagatcttgccaccgttttttattacaatactgctgtctctattttaatttacctagttctatacacttccgccccattcatagcatcctactttaatgaacctcttttaacagaaattacccggatttccggacttaccctgattacaggagccttgggagctgtacacggcacattgctccacgccaacatggaattcaaaaaacaaactattttctccattcccatctttattatttccgggattatcggcatttttctagcgtatatgggttacggagtatgggctctcgtgctacagggttttttatcttccgtattaacaactgttgcactttggtattttgtaccttggaaaccgagtttggagttttcatggaaatcctttcattcgacatttggattcggatgtaagctgatgatttcgtcactctttgattcctgttaccggaatgcctatcaattcgtcattgccaaaagattctctgcagcggatctaggctattatacacgtgccaacaccatggcccgcctccccatgtcttccctgtattccattatctccaaagttacttaccctttgatgagtcaaatacaggataatgatgaacagctccaacatgtattccggagaatccttcgcatgatggcatatatcattctcccctgcatgcttttgctcgtccttacagcatcccctctcgtttctgcgctcttaacagaaaaatggcttccttgtgtgccttttcttcaaattttatccctctctctcgcgctcactccaatgaacgccctcaacctcaatctgcttcaagccaaaggaagaagcgatcttttcctgcgtcttgaagtatggaaaaaaatcctgggcgtactgatcctgtgcgccaccatacctttcgggatttttttcatgtgttgcggcctccttcttctatccattctggaactggggattaattcctactataccaagagactgattcaatatgggatcaaaaagcaaattaaagacattcttcccatcatcggcctcagcattgcctccttcttctgtgcgctccctgccttttacataacggaaaatccctttttcatcctggcaatgtcttcctgtatttacatagccatttttattctattatcgctcttcttcagatttcaggagatatatgatttaaaaaacatggttcttaataaataaaatcatcccatatggcccataccctttccataatcatcccggtttacaacacttcggcatttttagagaaatgcgtagaatccgtcttgaagcaaaacgtggaaatggaaattattttgattgacgacggatctacggatgacagcccggccctttgcgaccgtctggctctttgcgatgcaaggatcaaggtcattcatcaggccaattccgggatatcttccgcaagaaacagagctctggatatttgcaaaggcaaatatataacgttcgtggacagtgacgatgaacttctggaagatacttacaagcccaatcttgaaattctagaacaaaacgaacatatcacagtcgttcaattcccatatatttatccgtacaatcaacccaatccccgcaaaggggcagattctgcacaaatgtgggaatgtgaacgtgacatcctggaagcctgcatgtctccagaagtcaatcacgccatatggaataaaatattccgccgggccgtgtttgaccaactccgctttccagaaggcaccgtttttgaagatacttatattatccctgacctggcaaaaagaatcggttgtttatattcatccggcttaggaggctatggatacaaccttcgtcccggctcaataatggcatccggatctaacccacaaaaaatgcaggagcgtttccaggcttatgaacggatcgtccacgctgcctctggctatcctgatcttcacaattcccccctgtttgtcaattattaccatcaatgctttcttatgatggtgggaattaacagaaccccaaaaaaaatctcctcccgttatgaagattctctcaaccgtttccggaccatttcatgcagcctttcctccattttccggacgaaaaatcttccggtgaaagaaaaaatacggctggttttatcaaaaattgcaggaattcccctttatttaaaatatttttcataatctcccatgaaaaaaatattactatgtttctttattcaacttcgcggcgtatttttgaaaatatcatacctgtgcggccgccatccgaaagtcctcagcatcaaagattccctgtcatatattcttaagcaccgcatatccatcagcaggtatggggatggggaaatacttctcatggaaggctatcctattggatttcaaaaagaggatgcggcattagccacgcgccttagggaaatagcccggaacccaataccgcaacaccgggtctgcatccctgatgttttttccggcatctcatcttacaataaagaatccagaaaattctggaaggattttttattccggggaaacggactgacccttttcaacaaatatttccagtccggcccctatctaaacacgcagatcagcagattttacgaacatctgaaagacaagacggaaactccgcaatacatcagcctctggcgccagattttccataaccgtcacctcattctggtggaaggtacaggttctaaactgggttttcacaatgacctttttgaaggagccgcatccatccgccgaatcgtctgcccggcggaaaacgcttttaactactaccatgctattctggaaacgacgctggacaaagcaaaaggaatggatcttctggttctaatcgccctgggcccaacagcaacggtcttggctcatgatttagcggaacacggagtacaatctattgacgtaggacatatcgacatcgaatacgagtggtttcaaatgaaagcaacgtcaaaggttccggtgccgtggagatatgtcaatgaaacaggaaatcgtctttctgaactatcttccgacccggaatataccagtcaaattattgctcaaatcggcctttcatgactccagattctccgcctcttgtttccatcatcattcctttgtataacgcagaggaaaccattgattcatgcctgcaaagctgcctagggcaaacctacaaaaacctggaaatcatcgttattgatgatggctcttccgacaattcccgggcaattgttcaggggtttgatcatgcctatccccagattcgcaccttcaggcaaaacaggggcggtgtcacggaagcacgcaattacggtatgcgaaaagctaccggacaatatttgttcttcatggatgcggacgatgatttaccggctcaatccctggaagttttggtagaacgggctgtggaaacccaggctgacatcacagccggtaccactcttcacttgactgaaaagagagagctaatcgcccgaatgaactatatccctttttctaccctttccggagaagaatggctgacaaccatcaggaaaacatggcaaggccacctatgggggcttttgtttagaaaatcattgtttgagcatcctctgctttgtcctctctctcttaaaatcggagaagatcttctgcaagtaactcaacttgccatgcgcagtcatctcgtagccatgactccacaaacagtttaccattatattaaaagagaaacttccgccatcaattcgcgccagcttccttcagacattcgacaaggggatgaaatcttgtttgtagaaaccatgctccatttacagaaaaaggcttccacaagacgaatgcggacggaatgccgccttctatccctgtttgcagtacttaatcttccgtcgtcaggttaccgcagcaaacttctccatcacttccgcacactctatttatcttatttgcttacggatcgccacctcatcaaaacgctctggaacatttctccccgcctccatattggaatgattttggactgcatcaaataaaaaataccaattatggcctgtttgctatctaaaatatcctttattagaaaaatccatcgttttttctttagattatatttagaaaaaaaacggaagttgaatatcgtcaaaaccctgtggttcaatattagttttttaccatggaagcaggccaaacactttccgtttttcatacacggatcattaacggtagcacgggaagggggagctctgctccttgatattcccgattcagaactgaaaccgggactcattcgtctcggatatgattatgaccggttcagcactaactatgccggcactttgcttcagctatccggtaccatccggtggaaaggccctttccgcagcagcgtcaatgtggtcattggcgccagcaagcctgagtcctttctggaatttggccgttatgttagtctcggcgcccagggttccatcagagcttaccgctctatcgtcattgaagactacgtcgccattacccatgactgctgcatttacgacacggatttccatcctttccgcaatatacggacaggaaatattaatccatacgccattcccgtaaaaattggtcagggttctttcatcagttcagggtcttatattgccaagggaacggttctccccccatattcgctagtagcatcccattccctgctcaaccgggactattctctggaaaatgtaaaagctccattcatcgcaggcatgcctggcaaaatcaaatcgcaaggacttgtacgtctctttgaaaaagacctcgaaataacagcctctgaacatttttcgcaaacagattgtcccttaatcgttcacaggggaataccgtctgatcattccggaagggaaggctctttcatatgatagccatgaaaaatatactcatctactttgattatcccatcacttccattcagggaggcacggaacaggcctcctttctcctggccaggctgcttgttcgccaagggttccgtattatttttctttctcttcaccctttcaaagaaaaaaataatgaattcctgcaatactccttgccggattccgaatacttgttcagcagacgcaatgccgattttacagaaaaactttgcgatgaacaaaatatcaattttattttgaatgaaggagccgcctccgactcatccttcttcttcagccacgcccatttgaacacaaaagccaccatcgtttccattattaacttctccatctgggaaggacttgatcatttcctgtccctcattcccccatccgggaacacatggctagccaaattgaaaacagttgcacgcgttgtatcggctccatggaaaaaatacatggccattcgcaaaaagaaaacaaaactaaatcatttgcttgaatattcagataaagtggtggtgctttctcaaaaatatattcaggactgcctttcacttacctccacccgtaatgcccacaaattatatgccatccccaaccttctgacattccaaattcctgaaagcttatcttccggtacaaaacaaaatattcttctttacgtagggcgcctcagttatgctgacaaaagagtagacaggctgttgagtgtatggaaaaaacttcaacctgtccataccgattggagtctctatattgtcggtgacggagaatacagagaaaacctggaaaaaatatccgaagaatatcatttgaaacgaatttttttcatgggacatcagaaccccgaacctttttacaaaaaatcaaaaatcgtatgtctcacctccacacatgaaggaatgcctatggtggttaatgaagcgttggcctacggatgcattcctgtggtttttgacagtttccatgctgcaaaggaaatgattccgaatacggaaacaggaagacttgtccctgctttcaatcttaagcaatacacaaaaaccctggacggcctgatgaaagaacgctacaggaggcccaactttaaagtattggacaattacaaagaagaaataataacccgaaaatggcttcatgtcctgaaaaacggcaatgagtaacattattatttacctacctaacgaacctctgggcaaacagggcggcatggaaaaggctacccatcagttggcatgccttttacgagattccggacacaatgtcagtttgctctgtcagcaaaaaaacaggctgaatgtcccctatcgccctccggtccctcttattttcatcccccaaaaactgaataaaaaagagaaaaggaactttatcaacgatcttatccgccaaaaacaaacagaactcatcattgaccagacggaaggaggcatcataggaaaatatggcattttcaaaaacagaaaacagatacaatcaaataaaataaaatttgtagcagtccaacatagttcccagtatacttatctgaaatactaccgctttattaaaaagaaacattttgaaaattccttttcaggcagactgaaaaatttcatctataacaatatttatttgaatataaaaaggttgcgggcctgcatattgcagaaaaaactattccgtgatcttactctcaactacgaccggatcatcaccctttcttcaggaggaattggagaattccaaaaaatttattcaaagactccttcctgtaaattagcagctattcccaatgtcattcccgatttagctcagaataccccgccctgccaaaaggaatgccgctgcttattcgtcggcaggcttgataacgcagcgaaaggaatagaccgcctgctccgtatttggaaaatttttgaagaaaaacttcccggatggcatctggatattgtaggcaacggccaggatgccggcatgttgaaagaaatggcacataagctgaacctcaaaaatatttcttttgaaggatttcaggagcctgaaccctattatgcgcgatcctcgcttttttgcctgacttccacctttgaaggctttgggcttgttcttgcggaggccatgcaacacggttgcgtccccctggcttttgacagttacccggcagccagagacattattctgcccggaaaaacgggggaactgatccagccattcaatgaacaggaatacgcgaacaaacttatttctcttgctgccaacccggacgacttgggcatcctagcggaaaacgcccgtgagcatattaaagcattttccccaagcaagatatcagtcaaatggaatgttctcatacaaaacctatgaagcccaaagagcaatatctcgaagcatcggcctcacaataatagactaatgacaagcagcatgaaaaccagctacaatattctgattactacgacagggctttcctctgtaggccaggggggaggaatttcctcttatgtccaagatcttgctacaggccttgtttccgccggacatcacgtcaccgtctatttggtcagggaaggaaaagaagtattcccacacaaaacaaattataactattcctttttccatattcctgccgaatatcggcaggaaaaatcagctgtcattgctctcctggattccatccggactcttgcccctgatattatcatcaacaatgatgtttcctatctgtccggcttatggccggttttagaccagtcaattgtcaaaatatccgtgatgcatggattttaccatggaaaaactctaaccaactctggcatacaaggtaaaatcgcgtgctgtaactggccatatgtcgactatatcgtttgccaaaaccagaccatgtgcagggaagcggcggccaaataccggattccttcggataaattcgtttgcattcaccagaccaactggaatcaatctcctttcttttccgaacacaaagagaaaactcagaattccatcaaccttatatgtgcctgtgggcaaagtaaaaacaagggagctttcatcatgcgctccctggcggaaaaacttatccattctcctttgaaatttcatttgaactggtgccttagcgtttctgaaacgtggcaagaacgtcttcaggatccacgcatcagtttccgtggcaatattccgcgggatgaatttctgcaacttcttgaaagagcagatgccatcattatcccgacacttttggataccggccccatgctggttgtggaagctctttccaccggaaccatccctatatgcaatcttttgaaaagatcagctattccggatttgatagaaaacgggaaaaacggctttctgatccccgacaataaaattgacctgtatttcagggtcattgaaacccttgctgaaaacaaaacaatagccgcttttggcaaacgatgccatgcatatttccttaatcatctggaacccaaaaaacagctggagcagtacgcttacctttttgcacataagacggagacgcctccttcccaggccttttccgatgccgacgtaatctgtttccatttgcacaatgtatcaggctatcctcgttattcccgcaaaagaataatcaataaattgcttaccatccaggaaaagataatcacatacaaggattattcacgtttttttcgctttattcttgattaaaatatgaaaaaagcattccttctctttttattaaaattgctcccggaaacaagatgcttctccattaagagaagtcttctccgtctggttggctacgaaatagggcatgatgttcgtgtctgctcctctgccaggtttctgggtgcgggccatattattcttaaagaaggaacctggatagggcatgaaagcatgctggtctccacatccctgatttccgtaggcgccaaagtagatattgcccccaaagtctatattggtacaggaacgcacatagttgacccggtgggggaaagaacggctggacagggtatttccaaagatgtggttattgaagatggagtctggatcggcaccggcagcatactcctgccgggaaccagaatcggccgtaaaagcgtcatcgccgccggagccgtagtaacaggaaacataggaagcctgtgcatcgcagcaggagttccggccaaaccaataaaaaacatatcctgaatgcaaactatttttaaatatatttcacagcacggcgcatgggcatttttattcatggcggccatatccacttcccttctgggaccgctgaatcaattttcttttctttataccgcagctctgctggttcttcctttgaacatttctgctctaagaaaaataaccaacatcaattttcttataatttttttactcgctgcgtgttccgcgagcattattctggcagatcccgccgctattttcaagccatggcaacggctggtatatttcattctcctcctcttgacagccagccctctggtttcatcaaagcaattggatatattccgcatccaagcctttgaatggtgcatgaacctatgtgtctttgtcggagtagcctccttcttctgctacttcctaggcatcaattacatgagaacaatcatcaacgttaatgattccttttcaggttcatttggcggaattacgccgcaatccatgcttcttgggccggttgccggcattgctgcgaattggcttttatacaaaatcttgaaacgatatttctctcaaaccactttctctccgctcattctgctaatgctgggaacctgtttgtgttccatgcttctctcatcttcccggggcgctttcctcgccacggtgatgacggcattgtacgtcctgttcatgtttactaaagaccatatacgcaaagctcccaaaatcatcttcgtgcttcttctatgcttcacagcagcatcgccccttatcggcaactttgctgacggcttgcaaaacaagcagcaagccaatatggaaaaaggcggaactttatcctcacgacaaagtttatggaacgaacgaattaaggaattcaagtcttctcccatatacggagttggcttctcttcccaaaaagaaatacgaattgatatacggactctgaataccggagccgtggaaccggggacctcctatggagctgtcttctccatgaccggcctcttgggtggaatcccatttttaatgattcttgccagtcagatcctgaaaaaaccgtcaactgcattcggaatgcatgtcatttcgcctgcccaagtctgtcttgtattctttggaatgcatatgatggttgaaggctatgtctttgcggcgggaagccctctctgcgcccttctatggctttccataggagccgcttccgcatggcagaataaaaatatcactaacattgcatgcctatgaaattcctcttctggcaaaatatgatcagcatccatcaaacagctcttctcaatgctttggccagcaaacaccaggtaacgctggccgtccaaagagcttttgaagaggaaaggacggacagtggatggaaaatcccggatatgggaaatgtccatcttgaactatctcctgatgaacagcgtattcatcaactgattctttccaatgaaaccgccatccacgtcttttcaggaatagatgcctatcccatggtttttcgagcattcaaacaatgcatccagctgaaaaggactacgctcatctacatggaaccctatcagacaggaggtatttccggccaactgcgccggcttaaatacgctcttctttatttaaaatacggaaagaaaattcaagccttgctggcaacgggaaaattcggcgtgcaagcctatcggcgctccggatggcctgcatccagaatatttgaatggggctacttcacagaacaaacgaaacattccgcagatgaacaaaataccgaccaacaaaacagccgaatagcccccagactcctgtacgtaggaaggctggacaacaacaagagaatcctccatttgattcatgcattaaaatcgttccgctttcaaattgacacttttaccgtcattggtacagggcctctggtcaaagaaacggaatccctcattcatgaagaaggcaacttccgttaccttggaaaacaggcaaatgaaaatgtcctgcgcatcatgcagtcccatgacctccttattcttcccagcatgtatgacggatggggcgccgtcatcaatgaagcgctccagcaaggcatgcgcgttttatgttccgatcgttgcggcgcgtcatgcctgctggacggcatacataggggaggaacattttcatggaatgaaaaaggcagcctggaacgggagctgcgccattggataagtaaagggccaattacgcaaaaagaacgaacaggcattgcatcctgggcaaaaacaaccatatcagggcaggctccggcctgctatcttacttccatcctctcattcattcagggtaaaacatcgtcccgaccattaccaccttggcaagataaaatatgactctatgaacattttacataccatcgcttctatggacgctaaagcgggaggtccaacaacctgcaccttcgacttagccactggtttgaacgctctaggatgccgaaccgacattctgaccattgcttctgggaacagggccacctcttctattcaggccccttttattaaaaccgtcccttttgacgcaaaaacgcctcttcaaatatcccgccattgtagacattttttacagcagaatcagcaatatgatctctaccataccaatggcctatggctggacattaaccacgccacctgcgccgcggccagaaaattccgcaaaccctgcgttctttcctctcatggcatgctttatccccgggctttggaaagaagcttctggagaaaaaagctcattctttccttaggccacaggaacgatatcgcttccgctacatgtcttcatgccacatgccagaaagaaatggagtttatccgaacctttggttataaaggacctatagctgtaattcctaatcctacccctcctgtgaaatggattgacaccattattgaaaaccattcactaaaacgcataggttttctaggacgactgcatccagttaaaaaggcagataaactcattaaagcctggaaacaattaggtaacaaagtggcggatgcagaactgatactgatgggtgaagggacgccagaatatgagaagtatttaaagggtcttgcagctgaatgtaaatatggtcacattacttttcatgggtttgtaaatggtaaggccaaattccaggaactggccaatttgaaggttctgtgtcttgttagtgattttgaaaattttggcatgactgttactgaggctttgtctgtaggcactcctgtaatagccaacacgaccactccatggaaagatttaaatactcatcactgtggatggtggataaacgcaacagtagataatatagccatcactatagaaaaggctttgcatctatctgataaggaaatagcctctatgagtattcgtggcaagaggcttgtttctgataaatatgcggctgataaggtggctgaaatgatggctacactttataaatggttattgggagaatgcagtaaaccggaatttgtatatgaatgaaacaaaattgatttatcgcaatacctccatgcattaagcaaaaatcaagagaccgccacttaatatggaaaagaagtaaccatgaaaaagataattatatctatagttaccatagtatataatgatcataaccacattgaacgtactatacacagtgtcttggaccaagactacccttacatagactatgtaattgtagatggcgcttccactgatggcactaaagaatgcatatatcgctatgaagcgtttttaggaaccttgatctcagaaccggataaaggtatttatgatgcaatgaataaaggtttacaagcggtgaaaggtaattatgtactatttatgaatagtggggactgctttagcgatcagtcagttgtaagcaaaatcgtaaattacatcaagtcttccgggtattttccggagctggtttatggcgattatcgggaatcttccgtagaaggtaagtcacccataataccttcacggagttataaaaaaatatggtatggagctttcgcttcgcaccaatctattttttataattgccagtttttaaaggagaaaggacttaagtatgacttgagttatcaaattgcggctgattataaattaaatctcgaagtagtgaaatatgccaaaggaaatattttacaagtccccatgtgtatatcggattttgacattaccggtatttccaacaacaaccaagcgttaggtttgacagaggctgacagagctagaaaagaggtactgggcatgtctctattagttaggacgagtatcatactggtttcatgtatcgcacgattcatgaagaagtatctgaatcctatttaccgaaccctaagaatgaagcgatgaaccttagccaatataaagaatataaaccccatttagctcgaagagccatatggtaccttatcaaccataccttattcagatgtctaaagggaagaccatttaaccctgttcgcatcgcattgctccgttgttttggcgcttcaatagataaggatgcatatatctattcatcatgtaccatctttgctccctggaacgtgaaaataggaagggcttgcattggacctgacacaaatctttatagtaaagatatgattacagtaggagatgattctgttgtttcacagggaagttgtttgtgcacagcttcgcacgatatttccagtttaatgctgcccctacaaaccgctccgataatgattggcaataacgtatggttagccgccgatacctttgtgggtatgggagtaaacattggtcagggcgccgtggtaggcgcaagagccgccgtattcaaaaacgtagaatcatggacggttgttggaggaaatccggcaaaatttattaaaacaagaacagtcaataatcatgactgattatccaccttttccaataaagctttctccttttaggaaaaaactcttaaacaccatgtactctcccgtcaaccgaatttcgatcccgatatttccatattttctaaaaaattccgttttttcttacctgcctttttggaaccatagtgggcttaacttgctccgtaagcatgtataatacatcatcaattagtcctaaaacgatgactgtgggttctttttcttcttcggccttgagaagtcacatttactgtacgagatttatccaacgtggcaaatccgttcgcatcggttgcaatataaacatgctccgagggcactcacaatatctattctccgaatttctaactaatcgtaaaacctaccatgattaaaggctgcctcaggattgtgccgggagacacggttctgtcaggtatattgctattgaaaaacacggttgcagctgccgaatcctcgatcatttcttccgcaaaaataaaaaatggtgccactaaaaagatccggcagggtttcttaaaaaagatgtattggacaaacttcccttcttactcattttcatgaatccggagttcagtaaaaaattaaaaattctctcttttatcagcatcattggggttctggtcgctcacagttattttgtggaaaacaatgcctgggaaatcaatgcatttattcaagattggattggctgtcaaatcgtaagattttgtattcctttgttttttttcatctccggatacctgtttttccgagagacaaaagacggggggggaatacagaaaatactgaggaaaatgcgtacgagggcacactccctgatacttccctatttattatggaatctgttatttttcctttccattatttttcttcagctcatccccgacattggatcaaaaatcaattcggattttctgactctgcttcaaacaaaaagtatcccggaattatttcttttcattttctgggagccggccgctttccatttgtggtttcttcaatacctgattctttttgttctgttctgtcccatattttatgttttattctatagcaaatgggccactgtcgtcatatttctcatcctctgcgtaactataggaatttacggatgggggggagaaaacatgcagggattgcttgcttttttaatggggggttttatttcctataacggcatcaatattgaacggcaacagaacaaaaacgctatttttatcccttcggggctttatctcatatggtgcgctgtcaactgtttttatccggagtttcagttgccttttctgaatatgctcaggttgactcttggcgcttattcagtatggacgttatatgatttattttccgccaagaaaaactggttagataaaataatttcttgggctccttacacattttttatatacgtattccatgaaccgtggataaatatctataaaaaggcaattacactcttccttcctcccctgaaacttctttatttgtttggctacttcacaacgcctctcatcatcctcttggcaagtatcgtcatcgcccgcatattacagaaaaatacaggaaccgcatattctattttaacaggagggagacattaaaactcatgaatatttccgcgattattctgacttataatgaagaaattcacattcgcagatgcattgagaatcttctttccgttgcagaaaaaatattcgtcattgattgtttttccacagacgcaacgataaatatttgcaaagaatataaacaggttcatgttattcagcacgaatggcccggcaaccaagcagaacaattcaactgggcgttaaataactgtcctgttaaaacagaatggattctcagactggatgcagacgaatatttaatgccggaaagcctgcagaaattaaaaaaaattacggctgatcttactccagaggtaaatgccttatctttcatcctggtccgttattttttgggaaaacgcatcaaacacggtacaggcactatccgtttagtacggatgtttcgtacgggaaaagcccgctatgagaatcgcctcatggatgaacatatgctggttcaggaaggaataatcaaagatacggacatagaattcgccgacaacaatctcaataacctggaatggtggataaccaaacacttaaactacgcgaagagagaggcacgcatcttgctggatcaggaacatagagaatgcagccctaatcaggaactaagcaggcattccagaaataaacgcagacaaaaaaatatttatgcacgcattcctcttttctggcgctcttttttctacttttgttaccgttattttttaagactgggctttttggatgggaaagaaggctttttatggcatttcctccaaggatggtggtatagaactatcgttgacgaaaaaatttattcctttttaaaaaaacagaaataaatatcgcatcataatttttcggcattatttgctttagtcttgtttcgttgatctttccgatttttgatcggagcaatttgctaaatatcaatatctaaaacattttgaaaatcttgcgccaagactattcttgcataattccgcatttttttatcaatcttttgattagaaatcaggccgcccatctgccggatgaagtactaacgttccatcctgcttccggctcggcatgagagttattttatagttatgccgtcagtggaaaaaacaatggacagcattcagcatcccttcacaaatatatttcaaatttaaagtacatcttaattaacatgaagcaaatcacttcactcagaggcctcgcgattattctgatcatccttttccacctcaatccggaacatttcccctacggctacttcggcgttgaagtgtttctggtgatttccggctacctgctcatgaaatccctccagaaacagcagatgcaaatccgtctcggggaatttgcccgtaaaaaagtcttaagactttttaccccggttgccgtcatcgtcccgctcactcttctggctggcatgttctttctggactatacggatctggcgacagccagctccacaggcggatatacgctgataggcgccgcaaacaggttcctggccgtcatccagtccgactatttcgcgcaggattcctccggcaatccgttccttcacatgtggtacctggcggtgacggcgcagatttaccttctgttcgcggggggatgcgtcctgtaccgttaccttcccaaacgggcggccgcctctcttttctgggtcgccggcatcggggcctttctctgggcctattcctatcccattcacaacctgttgcaggaaatcggcctgcccgtctgggagcaggtccgccccacctcccattacatgacgctgccccgtttgtgggaggtttgcgcggggattttgttagcaatataccccccccctttaagttcaacacgttgcggaaacaacaagaaaaacgctctcctcttcatccttggaatgttatgcatcctcgtacctgccctttcccgcggaaaggatgtctccctctgctcggcggccgtagttttggggacatgcctggtgatccggtatgcggaatccggcaggctggcccactgcttcaacaataaacttctgctgtggattggaggaatctcgttctccctttacctggtgcatatgcccctcatcgcgttctatcattcgtggtttctccatgcccccggatggcccggaatgcttgccatcggagcggcgtccgcagtcctgggaggtctcctgtaccttgcagtagagaaaaagcgcatgaagatgaaatggtttatccccctgtaccttttcgcgttgcttctatgcgttgaaggaaggcagacggaaggattccggaactacatcaacaaggaaatcaactccatttccagcccccagctgcatggcgcatcggaaatcaaatctcctgaagccgcccggggatttgataaggaagccatcaaattcaataacaacatctttgccttcgtcagcagagccgatttcaagggaagtgcggaacccggcctgctgcagctgggttcccctgccgaagctccatccatagtcctgctgggggacagccacgcctctgcggccttttgcggattggacgcagcatgcagggaattggatatctccgggatttacgtttcttccgtcatttccccattctggaacagggaattgcccgcgctgccgtttgatgcaagctactattgcgacgagaaaaaaataaaggccctcatggcatggctgaacgtccacccggaaatcagccatgtggtgatagcccagcactggagcgcccgttacgacagtaaaaatgtaatggactggaagctgaagccgcttccctccggcgaacctgcctattcaaactccctccgtgcatttatctccgaactgcgggcgatgggcaagcaagtcatcctgctggcccccactccgctcatcaagcaaaatgacgtggccaaatacatcaggaacctcatacgcaggggggaaacgggaaaaggcctggaaagccttacctgcacgcggcaaaaatacagggaagatcatgccgccgtgcttcccatccttgaccgtcttgaacaggaagggctctgcaccgtcctgcgcatacttccctatataccggaagacaggccgttcaacgcctatgaacacggggaaattctgtacaaggatagcgaccacatgtccagcaaaggctccatcaaactcttccagcacctgaaaccccagttaaaggaagcgctacaaaaagaatccacggcatcatcaggtttacaaaagccatagccgtgaacacgtctgccgcagctccggcggggaaacatttaaataaaaccggcttttgtggaagctatagagttctctttgggaaaaaatgcccttgcatgatgaataatgcgtcaaatgtttaacactttttgtcatacattgaacatattttcatatttcttttctggtattgaagatacacttgctaaaaataaaaatattgttattatatttttcccctctaattatgcaacataaaaccattattgctacatgtgcggccatggccgctttttccggcatggctactgccgatatccagcttccactggatgttttaaacgccaataacggcggcaagacattctccgcccagctgggagcaggctacgctaccaaatacatcagccgcggtctggctttccagaattccgcaagtgatcatgtcattcccctggaagccgtcggcgcctatcaactgaacaatcaatattccctgataggcggattaaaatatcagtggctgacggataatggtctggaacacaatgattccggcatttgcgacgaaggctcggccatcttaggcgtcagccgcaaattcggaaaatccactatcgcggctctgagttaccagtttgtccacggcggtatccccggaagtttcaacatccacaatacaggcaacaactccggcttccctgctttcagccacaataggccggaagaacacagcttcgttctggacattcaccatgacttcggcaaagggctggaaaacttcttctgggactgccgcgtacaatatacgttccgctggatgactggctggtggttcaccaatactctggggtacaggtatgacgtcaacaaatccacctccgtcatcgtggcgggcacctggaacgccactgccggctattttgacagcaattccctgaacgccaatggaacccagggcatttccctgacggtttccacccctgtcaaggccacgaaagacctgaccgtgactccgttcgtgggtacggtctggctcggcaacggcggcctggcggccaaccaccgcggcgcttccgcccgtttcccttacagggagccctccaaggtttaccgcaatttcaccttcgtcgccggggtaggagttgcctacaccttctaacaatctgactatcattcactcaaccaacgcaagctccggcatgtgccatcaatcatgccggagcttttcttaactccccatgcccctgtccgccgttttccacacttcctccattcagaagcaagtggccgccctgagcgacgcattcgccatcgcaggagaattcctccattgcgacgtcattaacagcggccatatcaacatgaccttccgggccacctacaggaagccggacggcaccacccgccgctacatcttccagcgcgtgaacgatgccgtgttcccatgccccaaggatgtcatgcacaacgtggaaaaggtaaccaaccacatccgctggaaaatgctccgggtgctgaaaacgcccttccgccagacgctgaacctgtactccgcgcggggcggccgcaaatacctggaaattcccggttccggcttctggcgctgctacaactgcatagaaaacacccacacgttcgacgtggcggaccatccccgccaggcttacgaagcagcccgcgctttcggcgctttccaacagctcctgtgtgacatgaatccggaggacatccatgaaaccattccgttcttccaccatactcgcaggcgctttgaccatttggaaaaagccgcggcagcagactcccacggacggctgaatacctgccgcaaggagctggacttcatccgccgccgtgaacgttatgtggacgtgctgctggatctccaggaacggggggaactccccgtcagaatcgtccacaacgacacgaaaatcaacaacgtgatgctggacagggagacggacaaggctgtctgcgtcattgacctggacaccgtcatgcccgggagcgtcctgtacgacttcggagacatggtacgcaccatgacctcccctgcggcggaagatgaagaaaatctggataaaaccttcctgcgcatgcccatgttcgaggccgtcgtcaagggatacctggagtctgccagggatttcatcacgccgcaggaagtctccaaacttgctttttccggtctgcttatcacgctggaaacgggaatccgcttcctgacggactacctggaaggggacgtttatttcaaaacgaaaaaagaacggcacaacctgcaccgggcccgcacccagctcaggctggtggaaagcatggaagagcaaatgcctgaaatggaagaatgcgtccggaaatgcttccagactgttaacggctgagagggcatgaccggcattaccccaattttatgatagtaccggaacgcgggctggtgctatactgcggggcatgttaaaaaatatttctcccctcatcagcccctccctgctgaaaattcttgcggaaatggggcatggcgacgaaatcgtcttttcagacgcccacttccccggccataccttcaaccctacggtgctgagggcggacggcctgggggcggatgccctgctggcagccgtcattcccctcttcgaactggatgcctacgcaacgcccgtcatcatgatggccccggttccgggggactctctggaccctgcggtggaagccaaataccgcaaggcgctgaactatgacggggagattgagcaaatggagcgctacgctttttatgaacggtccaaaaaggcctatgctgtcgtcattaccggggaaacggccaaatacggcaacatcatcctgaaaaaaggcgttacccctctttcctgaccattggccgccagacagaccttccatgcagtacgattttgacgaagtaattgagcgccgcggcaccggagccctgaaatatgaagcgctgcttccccgctggggccgggacgacctgattcccctgtgggtggcagacatggacttcaggacgccccccttcatcatggaagctatccgccgccgctgcgagcacgaaatcctgggatataccgtcaagccccgccctttctttgaagccatcagggactgggtggaccgacgccacgggtggaaggtgaacgcctcggaaataggcttcgctccgggcattgttcccggcatttccagcgccatccaatgctttacggaaccgggggacaaaatcatgatccagcctccggtgtaccacccctttgccatgatcatccgggaaaacggccgggaaatcgtcaacaatcccctcattctggaaaacggccgctaccgcatggacttcaaccacatgaaggaagccgtgcgcggctgccgcatgttcatcctgtgcaatccccacaaccccggaggccgcgtatggagtccggaggaattgcgccgcgtggctgaaatctgtacggcaaacggcacgctggtcgtttctgatgaaatccatgcggatctgacccttcccggccacaggcacaccgtattcgccactgtttccgaacaggcccgcatgaactccgtcacctacatggcgcccagcaagaccttcaacgtgcccggcctgggcagttcctacgtgatttgccagaatccggacctgttcgcgaaataccaggactttgtcagcggcagagagcttgcggaagggcacgttttcgcgtacgacgggcttatcagcgcctattcaggcccggaaggggaggaatggctggcccaggcgctggactacattcaggaaaacatccgcttcattgacgcggaactgcgccgccgcatgccaaaaatcaaagccatcatgccggatgcctcctacctggtatttctggactgccgggaaatgaacctttcccagaaggaactggtggaattttttgtggacggagcgcgcctggctctcaacgacggttccatcttcggcaaggaaggggaaggcttcatgcgcctgaacgcgggttgtccccgctccatcctggaacgggcgctcagccagctggaggaagcctatgaaaaccgcggcttccggcaacaacaatcacaaaattaaagacacgcttcacgttctccggcaatggaattcatttccggaaccatgtattggggaaattttcccggggacatccagccccgccgtattttctcctgttgagccccttgcggagaaggctgcggcgcggtggaaagggaatatccgcacaaccccttccgccgtttcgcccgcgacacccccttactctcccatcccatgctgaaaaacacgcccgggatgccgccatgactttgcttgcaaaacggcaggaaaggagtatcgtcccccgcatgtactatatcaccacggccattgactacaccaacggaccgccccacatcgggcacgcttatgaaaaagtcctggcggacgttctcgcgcgctggcaccggatgaagggggaggaagtctatttcctgaccggggtggaccagcatggacagaaagtgcagcagacggcggaaaagctgggcattacgccgcaggagcatgtcaacaatatcacggagcaattcctggcgttgtggaaccgcctgggcatcagcaatgacggatgggcctccacgacggatccgcgccacaaggcctgcgtgcagaaaatcctgacggacctgaaggacaaggggcagctttacaaaaaatcctacaagggattctactccgtgcgccaggaacagttcctgacggataaggaacgggacgcggaaggcaacttcggcccggaatggggggaagtggtggaactggaggaagaaaactggtatttccgcctgaccgaccatgtggaatggatgaagcagttcgtggaaaagagcagtgattttgtccttccgtccttccgcaaggcggaagtgctcaacgccattgactttgactcggacctctgcatttcccgccccaagagccgcctttcctggggaatcgaattcccgttcgaccccgaattcgtcacctacgtctggtttgacgccctgatcaactacatttccttcgccggctacctggcggagccggacagcggcctgccggaattctccaaactctggcccgcggactgcgaagtcatcggcaaggatatcctggtgcccgcccacggcgtgtactggcccgccatgctgcatgccatgggcttttccgacgaggaaatgcccaccctgctcgtgcacggctggtggaacatcaacggggaaaaaatgtccaagtccatcggcaacgtggtggaccccaacctgctggcggaacaattcggaccggaacccgtgcgctattacctggtgcgggacatcaccaccgggaaggacgccaactttgatgcagaccgcctggtcatgctgtacaatacggagctggccaacgacctcggcaacctgtgcaaccgctccatcaacatgacgcgccgctattgcgactccgttatctccagcgcggaggcatatgatgacgaagcctccaaagccctgcgcgccaccatggaccaggccgtcaccctgttttccaaatacatggacgacaacatggcctccgatgccctggcggccctgaacgcccaggtttccgcctgtaacgcgtacattgagcagcagcagccctggcagctggccaaggatgaagcctccgccccgcgcctccgctgcgtgctgcgccatttgctggaatgctgcgcccagacgggctatctcatcggctgcgtcctccctgacgcctccgcacgcattctgggccagctcaacgccggggacctgttccggggccttacgccggccgcgctggagtggggaatcctccccgcagggcaccgcatcaatgaccccgcccccgtttttccccgcattctttcggaagaggaaaaggccaaactggctgaaaaagcggccagggcggcaaaaaaacaaggctgattcccgtgaattcctccgcatccttcgtcaaatccctgctggcccaatgctgcctgggcggcatttgcgagtgggtggtctgccccggcgcgcgcaacatggcgctgcttcaggtgctggctgccgcggaggatctggtgaaatggactcactttgacgaacggtccgccgccttctttgcgctgggccgcattcaggatatggggctgcccgtggccgtggtcactacctccggaacggcagcggcggaactgctccccgccgtggtggaggcctactaccagcgccgccccctgctcctgctcacggcggaccgcccggcggcctgccggggttccgccgcaccccaagccatcgaacaggcggatctgttcggcatttacgcacccacaattgacctggaaacgccggaaagcctgccggaagacattctgcaagactgggattacgcctcccccctccatatcaacgtgtgcctgccggatccggaccctgcctggaaccccggcagctgcgacctttacccggcggaacctccggaggaaaacggattccgaggctccctggcagaactggcccgggccctgcgcttcaaatcgcgcgacgggctggtagtcatgatcggcggcctggaccccacggaacaagccccggcccggtggctggccaacgaactgaaagcccccgtggtggcggacgccacctccggactccgggaagagctggcccatctggctctgacggacgcagacgccctgctgagggaacacccgcccgccgtcctgctcagattaggggacgtgcccgtgggccgcttctggcgcgacctggaggacattccagccacggaagtcttctccgtcacccgcaccggcttctccgggctggcccgcccctcctccgtcgtaaccggagacctggaagccattctgcatgcgctgggggatatagataccgtgggcgacgtcaacggcctgcgcgccatgaacaaacgcaggaaagccctgatggaggaactgctcatcacctgcccggaaagcgaacaggccatggtgcgctccttctcctgctttgccgcggacggagactgcatttacctgggcaactccatgcccgtgcggtactggaacagcttcgcccagacatccatccccacggaaaacgtccgcgccaaccggggagccaacggcattgacgggcaaatctccggttttctgggggtctccgcccggtgttcccgctcctgggctctcgtgggcgacctgaccgccatgtatgattccaatgccctggcactccttccccaactggacagggggacccgcgtcctcggcgtcatcaacaacggcggagggggcatcttccgcaccctcccgggagcagacggccagccggaaaccatgaggaagctgcttgtacaaccccacgcccattccttcaaggccattgcggaacaatggggaatgcgctacctgaccatccgcacggcggaggacttcgaccagcttgattccctggaggaaaacagccagacgcttgtagaacttatcccggacagggaacagacggaacagatgcgcctccggctggctaacgcctaaatgaagacaagcctttaccaaagaccggagtgaagacgatcctccgcccggccatatcttgcggttctctccacatggcttgaaaataccagataaaaataacatttcctccatctgaccataggggaatttctttcttgcctgacgaagagaagaaaacagcctcactatggtggtattcaccaagccgcattcaacagggaaacgccgggcaacagcatgtccgtcttaattcatacggaaggaagcgtcgcccgcaatccctctttccgcctccagaatgctctgatgcagtatccccgccaaacaaacacttccctgtacgggcatgcaaaaaccgggcggaacatcagtccacccggtttttgcaaccgcccggcgcgaacgccggaggcatgggttttccggcttcccgccgggatccccgttaaaggtagctgcgcaccacgccggcgacgcgttcacgtgccgcggcaatgcgcttgcgcaattccagcgtataggcctccatatcccggatgggggactgggccacgccggaaatcatggccgcctgggctaccgccgggcattcccattcaatgatgcggggatcaatgggcttgggaatcacgtaatcgatgccgaagctgagcggggctcccccgtaaaggtcaatcacctcctgaggaacgggttccttcgccagatcagccagggagcgggcggcggcgatcttcatctgttcattgatgacagaagcgcgcacatccagggcggcacggaaaataaaggggaagcaggaaacattgttcacctggttgggccagtcggaacgtccggatcccatgatgcagtcaggccgcgcttttttggcatcctggtaagtgatttccgggtccggattcgcacaggcgaaaatgatgggggaaggagccataagcttgaccatgtcctgcgtgagcaaccccttggtggaaagccccaggaacacgtccgccccggtgagggcctcccccagggaacagtcttccgactgggagaactgggctttcgtggcgtgcaggtcaatgcgcccggtatgaatcagccccttggagtcaaacatatagatatgttcgcggcgcactcccagcgtcatgtagaacttggcgcaggaaatgccggcggctccggccccgacgacgacgaccttcatatcctccagcttgcggcccgtcaactcggcggcgttcagaagggcggcgccggagatcaccgccgttccatgctggtcgtcatggaacacgggaatattcatctcctggcggaggcgttcctccaccatgaagcattccggagccttgatgtcctccagattgatggcgccgaaggtgggctccatggtcttgatcgtttcaatcagcttttccggctccttcacgttcagctcaatgtcaaaaacgtcaatgtccgcgaataccttgaacaaaacgcccttgccttccatcaccggcttggccgcatccgggccgatattgcccagccccagaacggcggtgccgttggtgatcacgcccaccagattggaacgcccggtatacagggcgctctgggaaggatcttcctgaatgcggagacagggttcggctacgcccggggaataggcaagcgtcaaatcccgttgtgaaaagcagggcttgcagggaagcgtttccaccttgccggggcggggctgggaatgatactgcaaggcgtctaatctaatatcgaaactcatgattgtaatggaaaaacaaaaaagcgagccttgcttgcaccacataatcgccatgcattcaagcaaataatcaattaatcgcgtcacacgctccggccccagaaaacctctttttacattgatagaagcctccggatatgctaacaggcagtcggataatcacctgtcatgtgaccatggaacatacgcctcccctcccttccggatttaatatcaacggttatcttatccgatccctgaagcagacggattccctctgccatgtctattacgcttcggacgccaaccatgttcaatacctgctccgcgaattctgtccccaggggctcgctgtgcgcgacccggaaagcgggaaactgcgttatccggaaaacacggatattgaacgggaagttcttccgctgaagaatgatttcgaagcgcagttccgcacgggctccctgggggaaatccccgctctgggcaccctgtacctggcttatgccattcccggcggccatgccgccgcgcagccggctcccggcacggccgcccctgcggcatccctcctccagcgcgatcagcggaccctggccactcccggaaccgccggggcggcgcccgttcatgcgggctcccttccccagctgcggaaaaagaagaactccgccggcatatggattctcaccctgctcctgctgggaggagcatgcggaacctattatttcacccggaaccccgcggaaaaacccgtctctgctcaggagccggacgttccccactccaacagggaaaagaaagccgccccgcccgccgtgaggggagaagcctcccccgaacaggaaaacgccgcgggcctctccccgtccggactggcggagcagccggaaaaaacgccgccggccacttcctccggggaacggaatgaagatgccccgggcgctttggaggaaaaatccgcagccacccatgcacagcctgacgaaaactcctccgccccggcagatgacgctgcggacggaaaacagccggaaccgcaacagcccgccaaccgggaggaatcacaggagggacagactgccgccaaacctgcgcccgtagtgcgtccgcgcgggaaagccgccaggcaaacgaccaatatgggggatgtgaacgcctatgtgaaaaaattcgccaagcccatgccgctgaaccagtggagaaaacaatacgccgagctgtacacgagctggttcggcaattccgaggaagtagccaaaggctggatcaccaccttcggccctctgggcttccgcgcccgcggcctggacgcctcctggccggacacgaacttccgcggcttcttccccaaaaccatgctggaccccaacggggaacccgtggcgaacctttacacggtcacccaggtgattgagggttcccctgccgaaaaatacgtcaaagaaggtgacctgatcctgggcattgacggacacctcttcaaaacgtcgcaaagcctggacgtgctttacggcccttatcagcaccagaaccggcgcggcctggacatgcacgcgggccttctggtggacaaggcggaaggcgccggaaaaatcaccctgaacctcattcccgcggaaagcgtggaaaaaatccagggcatccagcctctctggaaggaagtcttccgggaggaacaggctaaaaagcccgtttccctttccattccggtaaagggcggccagcaggtgcgcctgcgcgtggatgacggcggcaacggcatcggcagcgacggcttcgaatggtcggacctgaggctggaaggccccggcggaaccgttccgctgaccaaagcccagcaatacaccgtgggttacggagaagccaggtacgacgccaaaagcaaaatatggcaggcgcacgccgtctcttccctggtctttgatatccccaagggtgactggaaccttaaaggaacgggaacccccaggtggtccgcctccgtgggcgtgaccgtacaggtgggcggctcctccgccctgccggacgcagtgaagaaatatgtgaaaaacgtcaccttcaaaatcccccagcttggttcctatgccctcggcttccccaaaaattgcgccaagagcaaagcggtagtccacatgatgagcgaatggctggcggcccagcagcgcgaggacggctcctgggaacgcccgggcggctactgcggcaaccattatgatacaggctgggccggcctggccctgatggccacgggcaacccgaagtatgaccccgccattaaaaaagcggctcagtacatcgccttctccggctcccaatgctggtgggccgtcccccaggcttccgcgggcatcttcctgtgcgaatactggctgcgctaccgggacaactccgtgcttccggccatccgcaacagcgtgcagcgcatgaaaaacgaagttctttatggggacttcgtcaccggccacggcattcacccgggctaccggggaacaggtgtcagcatcggaggttcccacatgtgcctgttcctggcgctggccagcaaaactccggcgcgcacggaagacggcgtgctggacaaaatgatggaccatgcccagtccatctgccccaccggcatggggccctatggccgcatgacggaaaccttcacctttgaacccgaccgtgaatgcgggggaacctactccggccgtcacggcccgtactacatcgcctccctcatctgcggcggaccggagctgtacacaaaaaacagccgcatcatgtatggggaaggccccatcggcggctgtgaccagggccactcctccgagacgctctccatcatgtgggctctccccgcctactggcgaaccaatccggaagcatattacaaaaacatggaggctttccggtggaaactgacgctgctgcgcccctttgacggcggcatgatgcagaaccccaaccgcctggaactaatgacggcggactccgtcatcggcacctacatccgcaccagcatctggatcacggccctctgcgcggaacgccagaatctggcaattacgggcaagcctgaattccaggccaaaacgttccggaaggtgccccccatcattgacacggaatcccgcttcctgaacacctacgtgcgcaactggtccatggtaaacgctgcgcttggaaccaaggcccccgcctccctgaaatccgccatccgggaattgaaaaatattccggtggaacagggctgccgctttaagcttatcaatgtcgtcaacaaccgagccctccccatcgccaaggccatcatggaaattcccggggtggaccagctcaccagggctacctgcgcggaaatgattctgggcatggatgtgcgcattttctttgaacccaagctcaacgacggtaacccccagcccggggaatattctctgaacgtggacatccagcagcctctgggcggccgcgccctggggcttcaccgcgacaaggagctggaagggaaagccaactccgcctacaaatatgattttgccggcacggtgcaattcagcgacacgaccaccttctcccccatggaaaccatttcctggacgcccaattccaaattcggcggccaatggaacgtctactcctacaagaaggaactcagcggcccaacccagccgggcgtgcaaaaaatgaacgccaaaatcaaatggcgcgtcaatgacctggaggtggaatacgaccgccccattgccgtgggcggctttgaagtgggatgtgcagaaaaggccctctcagtcaccaactgcaaccatctgtgggtgccgggcatcctgatccgggatcacggcaactggggctgctccttccatctgccggacggaacctacatttccgcggcctctcagggcaaccagatagaggtgtacgacaaaacggataaaaagaaggaaaaaacctgggtttccccgaatgactcctgcctgactcagggttcccgctgcctgttccgcgtttccacggactggcacggcctggaatgccgcgtgcgtgaactgaaactgctgggaagttccacggaggaagtggaggactacaagctgaaagcctccaccggaggccgtgtggacacggccaaactgatggaccgggacgccactaccgttgaggaactggacgcttcccccacggaagacgagcccctggtgctggaactcaccctgaaatcccctgccgccctgcgcgccgtggacatcaagattgaaaagggccacaaccgcctcatcattgaggcctacaagggcggcaagtggatccccatccactggggttccctgggagcctccaccgccggcgtcagcgaggcgcagaaagccatgtacgccaatgaaccggaagtgctgcgcatgctccagcttccgggcaacggattcatcaaatgcatgcgaacatttgaccccgtcaccaccaacaggctgcgcgtcaaactcttccagaagggcggaaaagtccgccttgcggaactgcacgtgtacaaggcgaacgccgccaaaaatatggctctccgctcttaagctgcggccgcccgcagctggaaatgacaaaaagcctttgtgataagagaatcccggcaggggcgccaatcgccgcgcccctgccgggaaaacagagcaatcccttttagggacggagggaatttccttctccatgccgaggccgcctgccaattttttgtctattgacactcagcggcgcccgctctatattttctcatgatgttcatcagaacggcactcctttttcctcttctctttctctcactttcagcatcttccgtcatggcggcgactccctgggcatccgacaggaactgggaactcgtttttgaagacgactttgacggctcatctctgaacgaacataactggagccgcattgattacgtaggctataacgccccggactggcgcaagtaccaatcccgggacgaaagccttgtggaattccgggaaaaggacggcaactccgccatgaccttgtggggaaaatacggggactacactactcaaaccaaccagaccgcaccggccaaaacatacgcctgcggaggggtatattccctgaaaaccttctccttccaatatggctacgtagaagtccgcgccagattcgattgcgtgcagggcgtctggccggccatctggatgatgcccaaatccgacagcatcggctggcctgtcggaggggaaattgacatcatggaacacctgaattacgaaggccgtgtttaccagacaatccactggtcgcaaaacggcgttcccaatcaggataaatcccagggggtcacccccggttggaacgatggtgctgaaaaagcaaactggcatacctacgggatggaatggacggaagaaggcatcaccttttatgtggatggaaaagcaaccggttcattcaaaaagcccaataacgcaaactggccctttgacaaggacggaaacgaattctacctgatcatcgaccagcagattggaggcaactgggtggaaaatgcaggagttaataagggaatcgaccagaatacgctggccaattccggagccgcattcgacatcgattatgtcaaagtctattcctcaagcatctacaaccacctcgttccggaacccgccgcggcttccctgggcctgtttggagcagccttgctggcggctcgccgcaaaagaagctgatcagccagcactctttttattccccctgccgcggaaataaatcttccgggacattcccggcatattctcaggcaaaaaccgtcattggcacctgcctcaatatttctggactggggatgaaggcagcttttctcctccgtcctcttccaggcggcacagagcctccgcacggcggaggcaggaatcccacagggaagccttttccggaaacgggaaacacagggagtcgctcagcttttccacccgtttgaaagaatcctcccggtcataggcgttcaaaccttccagacgtgaagccagcccatccagccagggaagagggtcatggcaaatcaggggaagatcgcatccggcccgcagggacaggaaagcggcgtcatccggtgaatactgcgccgtaatcgcccccatgcacaaatcatccgtaaacaccacgccccggaaaccgaggcggtcgcgcagaagccccctgatcacccgttcggacaaggtggcgggataatcgggatcaatctgaggcagcatgatatgggcggacatgatggaggacaatgccgggcacagagccagaaaaggcagcaaatccgtcttgaacagctcccgttcatccaggtcaaccacgggaaggctgaaatggggatccgccagggcacggcccatgccgggaaaatgtttgccgcagctctgcacgccgccccggcgcaggttggaggcataaacgccgccgcgtgaaatgacgtcctgggcattatctccccagcagcggccgggaagcgcgttggccgcggacggatcatggcagatatccagcaccggggcaaaattcaggttcacccccaggtagcggagagccagagccgtcaccgcgcccagttccactacgccgccaaccgaaccgagccgggccagcgaagccggggagggcaaattcaggcccagggaagcagtgcgcaccacacggcccccctcctggtccacggcaatgacaggatggtggaggcaaagtttccgcagcgactccgtcagcccgcgcacctgctccacggaatcaatattcctggaaaacagaatgaaacccgccggctgccaacgccggatggcagcctcttcctccgcgcccacttcatggccgcttatgccgatcagggccgggagcatgaacggaaaaggattaacggcccaacagggaagtcctggtgtacagcgggtaaacgggaatgccgcgttcctcaatcgcctggcggccgccttcctcgcggtccagcagcaccagggcggcggcaaccctgcccccttccgcctcaatggcgtcaatagccttcagcgtggagcctcctgtcgtgatgacgtcatccaccacaaccacggtatccccggcctggaaattgccttcaatgcggcggccgcgtccatggtccttcggctccttgcgcacggtgaacacctgaagcttcttttccgctccttccagagcgctggtcatgccgacggccagggaaatagggtccgcccccatggtcatgccgccgatggccgccacctccgggaaacggggcaaaatatcctctttcaccagcttccagcccagagcgcccaccagggtggctcctacggggtccagggctgtcatgcggcaatccacatacaagtcggacaccttgccggaagccagtgtaaaagttcccgtgcgcacggatttttccaaaagaatgcttttaagaagatcgtattgttcgctcatgaaaatagggatgaatgaaatggttcgccgtgtataacagatacccccggaataagcaacggataacagcatgcaaatcttgacaaaaaggaggacaggccccataacctgcctgtcattttcccgttcccatgaaatccggcatactggcgttagtttctatcagttccgctcttgtttcctgcacatcgtacgagaggcccccgctgtttgaccaaatcaccggaaaaattcagggaatgtccggacgggacgattatctgtccggagtgggcgccacctcaggcgtcaacacggacctgcctccggaagcccgtctgggccagggatattgggacctgccggcgggcacccagggggaaaagcacatcatcattgacctcaagcagcagaaagtcttctactacgtgggaaccacgctcgtgggcgtttcccccatgtcttccggcaaggaaggttacggcactcccaggggaacatacaaaatcatccagaaagacgccaactacaaatccggcacatacggcgttctgcgcagcaaatccaccggagccgtcgtcaacggggattacaacgccagggctggcggagcgccggcaggaacctacttcgaccccgcccccatgccctactggatgcggattacgggaggctacggcatgcatgtgggttttgtcaccggatatccggtcagccacggctgcgtgcgcctgccggaggacatggccaagacattctttgaacacactcccatcggcaccaaggtcaccatccgttagccgtttcctgcgcggcatcgcgccgcagaaatgccacactttccggaaaccggcgtgtttcgtattcccgccgtccggaagcgttccgtgctgataactgctcccgtttcatggcgcagcttcctcactccggcattgacaaacggctccgaacctttttgaatatacgggatctttgacctcttgattagtcatgacaatccctcttccccctgccctgccgccccatttcaacataggcggctataaaatcacggcgcttgtagaaagcggtccggactatcatctgtaccaggctctttccccggaaggccatgccgtcctgatacgcgaattctgccccgggggcctcgttacgcgtgacctggccagcggagaactggctgtctttccggaaaatgaatcccaattcgcccaggcccgggaagcttttgaaacccaatacgcagcaaatgcagaaagcaagctgaggggattcggcaccgtgctcttcctttacccgctttctccggcgcagccccagccggctgtagcgcatgcccaggctctccgccccgcaaaaaaaccgcagcaaccgcaactgcggaaacccgtagtcggcgccaccatccccggaacgccgctgccgcgggtaaagcactccggagggttcccggtcatcacggtcattgtgaccgggatgctcgccctcttcggatttctgggctaccagatactcaaggataaagaagaacccgtcgctaaagccgttaccgtgcccgtaccggctccgcccaagcccaaatccaagcccgctccgccaaaaccggaacccgtggtggtcgctcccgaaccggaacccgtggtggtcgctcccgaaccggaaccggagcctgaaccggaaccgcctgctcccgacctttccccctccccggaagtcattgccatggaaaaggctttacgggaggaagctatcgcgtccaaggggaaattttctgaaaaactgctgaacaaatatccctattacgcggaagcctacgtacgggattacgtaaaaaaacgcggaggcagtttttctccggattttgaaaaatggctgaaaaacacgaaaaacaatcgtgaggtcttcgccatgtttttcccgccggaccccagcgtcgccaccaatgtggctttcatgattgatgaactggggctggaaacgacggaaaaatatgaccagctcgttctggcgttcgcagtaggacgccgcgaattcggcatgggggccttcgaccttacccagcagggccgctacattgatgcccagggcaagctgaatgacctgagatcctccggagtcatgcctccgccagcggacctgtattgcgccggaaaaccgcccgtcaactggtatgggaacgccccccgcaccgtggatgaggaatgctacaaaaaggtggaagcctatctggaccgcaaaaaaatcaccccaaagcaggcctggctcaggaaataccccaccgtctcggaaatcggggactccgccattacggaagacaacctggccggctttctgcacgaatacatgtaccgccacggccagctgaggcgcaaaagggaccccttccccactccggtggaattcttttcctaccttgtggataaatatgaacattgcggtgatttgcgcgacgtggaccgcaagcgtgtggaatggaccggcgtttccctggaaggaacgccctggccggccatgatggccctttcggaaacgcgacctctgcgtgagtgcgacagcgtgtgggaacgctacatgggccagcggggcccgacccgcctgtggctgtacggcccctaccgggcggatgacgacaaggaaccgcccatcctgttcagctttgacccggatccggaatggtccagggaatccaacgaacgcaagcttcatgaaggcggtgtgtgcggcaccatgtcccttatctcccgcaattcccagattgcgcgcggcattcccgccgcccccgccgggcagcccggccacggtaatctgatgaccacccatttcaacggtaacggctgctggctgagcgtggggcaaagcgtggacaccctgaaagccaccacgggattctggtacttccgggattccaacgcaccgcgcaccggcaatgcggaataccagtccggactggccctgtccatgaacatcgactatgaaaagttcatcgacagccgcttcgccatgaacatttacaaactggcggccatcggctccaccacggaagagacggccgccccttccgtcacgctccccaaggaattcacgcagaccgccatgaggaccgtgctcaaagccaacccgttttatacggaagcctggtacacgctcttcaagcaggaacctcaggacctcatgggagccaccaagatggtggatgaagtaagggaggccctgccggacggcatgggcatcagaaaactctggaaaacgcgcaaatacgttccctctgtaggccgtggcgacaagaacggcaaggaaatgcttgccagccacgccaaggaatacgtcaatgtgctctgctccgtaattctggaaaatgccttgaaacaggaatatgactataagaccttccagtgggccgaactcatgtcctggctcaagtctgaatccaagcgcaactcctacccggagcctcaggccgcgtatcagatagcgtatgccaaggcccaaggcgcagacaggctcaaaagaaccgtagacaggggattcaagaaagccctcaacttctaccgggacgacaacaacgccctgaaggagcctaaggatgtggatcaggaggaaatgtccttttctctggacgccctgtgccaggccctgcccaaggaagaactggtcccctggatgaaaaacatgctggacacctgtccggacgggttcaaatacaagcccaaaaacaagaaggaaacgaaaatccacccattctacagcgccctgacgaaaaactacatgtctctggctgacgattcggagaaatcccgcgtcaagtcggaaatgaaagaggcttccgacagaattctggagctttcccaggacaagaaaggcgatgggaatgggtcctccggacgccgccggagacgctgatcccccgcttccgtgcacctctacgtccacattcccttttgccaccgtatttgcccgtactgcgctttcttcaagcacacgccggcctccacggacatgaaatcattcatccgagctctgggcagggaggcggaatcccgcgcaaccgctctggccacgaaccgcggaggggaaacggccacgctttactttggcgggggaacgccctccatgctctcggacacgcatctggggcgtctcatggaaaccctggaccgtctcgtgcccgtggacaaactggacgaattctcctttgaggccaaccccgccacctttacggaaaaaaaagtgcgcttctggcgcagcctgggcatgacacgcgtctccctgggtgtgcaatccctggattccggcatcctgcatctgctggggcgcgaacataccccggcccaggctctgcactccatggaaatgctgaaaaatgcgggaatggcccatatcaacatggatctcatgttcgccattccggggcaaaccctctccatatgggaagccaccctgaaggaagctgtccgcgccggaacggaccatatctccgcctacaacctcacctatgaagaagacacggaattcttccggagcctgctgcggggggagaaaaggcaggatccggacgaagacgcatccttttttgaactgacggaacacatgctggaggcggcaggcatgcgccactatgaaacatccaactacgcccgggagggctgcctctccccccacaatatggcctactggaagggagaagactatgtaggcatagggcctggcgcggtcagcaccatcaacggcatacggtactccaacacgcgggatacggacgcctacatacgcagcacgctggaaaacggcctccccctttccgaacaggaacccgtcaccgaggaagactaccgtctggaacgcattgccctgatgctccggacggatgaagggctgccgctgaaatacatcctgccggaatcccgccccctgctgggacaataccgggaactgggcctggcggacatttcaccggaacaaagactcatcctgaaagggcgcggccgcctgctcgtggacgccatcgcggcggaactgtgctgaatggcattattttcctaacttaatatcaataagttggaaataaattagaaaaacgattaaaattaatttcttgacatttttcaatttttatctcccattattccataaatagacagatatgttccatgcatccgctgttcaacatttcctctgtttctttgctggcaggacttcttttcctgttgcaggcctcctttaaccacgcatggggaagtagtaagccgccggcatcaccacaggagccccaaacgttcatcctgcccctttacctgaaatccacgcctctttctgaaaaaaggcaggtcttccggaaatccctatccgcctttccttttgttaaaaagaatccgagaatccatcaatttgtccgggaatatccggctttgacctttgacgaaggcgtatctcttttcgttcaacggaccgccatgggacaaacacctggtgatgtttgtgcccgcctcaatgaattgacagccctgatgcagcataaaaatatgcaatcagggcaacgccgctcctgccttaccggatttttggaaaatgcctttctccggacgtactccgcccggtactcccccttggatatggaagctttatcgctttgcgccctgatggaactggaaatggaggaaggatgcccattgatccttcggtctcgcattttaaaaatttgggaaagcgcagctatatccatggaaaaaggaaccggcatgcaaagaaaactggcagctcttttatttataaggacactgcggcatggaaaagaagatccttatttaatggcccgttgcggataccggttagccaatctttatatacgcatgaatgaaccgcaaaaagcccagtgggcagcatcctttattccgcctattcggggcatggaaggcgcccgtgctttaatccggaaatggacaacacccgcttccaacaaaaaaaagcgtaaaaaataatctcattcaacctgcctgatcatcatatggacaacgcattcatctcccgatgttttcttcaaatgcctgttttgcttgcaattgccggcattgctgcactatctgccctcctcgcaaaaggacaacaaatttatgaagggaagacaacattggaatattccctgtctccggttgaagtggtagccaatctttcccagcttgcagataaattgaaacaatgctgcgccggagaagtgaaaatcccaaatacaacgaaagtcactgacccaaaatctccctctactattccttataatggaaaaatttccctcaaggattttaaggatgaacgtattagccaacctactactgttgcgtggctttcattggtttccgacgatgggtgcgacatttcttataccacagggaacggagaaaaaacagactggttaaaagaacacggaaaaggacatgacatttccaaagggcgccgggattgcccgcatgtcttgaaagcaggttcttacaatttccaaatcaaatattcgcaaacctattacaatcccaagccgggcacaagtgatttggacggcatcagccttgtagtcgctcccattgtcgtggacatttgcattggagaaaaatcgatcccatatagtaaaagccaccttttcttggagaaaaaaacagaactccgactcgctatcaacaaaatttacctggcaaaagggccttccgaaaactccgaagacatatccatcacatgggaagctcaaacttactccaaatgcccgcaacgatttaatggagttattctggcgtgcaaccatacgttccaaccaaacaacggcgcctggaaacccatcggcaaaggcccatgcatcacctatactccaacggaagcagaactaattcgtgtgaccatcggtgataaaagcttttattacgaaggcattcccaatcgtttaggagaaatttactggaccatccgcccctgccagggactgcccatggcaaaccatcactttctgctctttgtccctgacgacccggtaaaattaaatcttccgaaccctgggcttgctaactgcaccgctatccccggaatgaaaatcatcactatcggaggggatgcagggccagaaatcaaataccgaaaaaaactcaaaatcatcccagctgccggaaccgtttattataagtggatttatgaatccctatctcctccatttgctcaagcaggtgtagccagcaaatatattgattgcttaactaacatggtttaccataaaaatgacaatcctgatatagtagctgttgaaaactggttcaaaaacaaccatgataaaaaatttacaaattttacaaatatcatagccattcaaaacaaggaactatttcaaaaagttcttcatttttcacaaagttataatgagcaggaacgatatctaaccaatccatcaactaaccgaaatccagaaagtacagaaaatggatcaaattgtgcttccttagtttcttctattttacagtatagcggagccacttgggaacagatacttgaatcagctgacacaaacggcattgatgttggagaacgccatcttatccctattaaacgttttaatccctaattttcatgatacaatcaaccaccatagcattcttatcgtcggcttttatatatttctcagtttgccaaggagatatttgtcaaatcaatggtctgagtccagaagatttgaaaaatctctcttatgaccctccaaggaatgaattgctttctgaggcacaagataaaaaggcatggcagacattcgttgaaacctatgaagtgcctgtaggtaaagtacaggattggtataattccatcagggataaagattccgctgatgctgcagccgatgcgttcaagagagatgtcctgcccattcttaaaaagctgacgggacgttctgctgatataaagaaacaagtccttgctattccagcttcttctgaaatgcaaaaactgattctttcacgtatcctcacattgcagagccgcttgctaataatttttcttcctatgcaagacagtaaaaagtcaagttccgatgcttattatcatggcagtgaaaaactctttgacatatttctaggtctaacgtcaacaacagccatggatatttcaaaatttattgaaactcaaaatgaagaccaggaaagcattgaagcagctttcaaagaaccatggacagagacatcatcttcttaaaaagcaggttacatagaaattgcgttgatctctattgaatttccatccttcttttattccccttcattcaggaaccctgtcatgcttccataatctgatgatcttgaaatactcaatcttcctcaccggttgcatcttccatttttatttatgttcagcatcctatggggatacctgccaaatcaatggactggagccggaagtactgaaaagcctttcttacgaaccgcccaacaaggaattgctctccaccggacaaaatcaaaaagcatggcagactttcattgaaaactatgaaatccctatccgtaaggttcaagattggtataattccattgtcgataaacaatctgccgatgccgcagccgattctttcaacaaggatgttctgcctattcttaaaaaactaacgggacgagctgcagacatgaaaaaacaggctcttgctattccagcttcttctgaaatgcagaaattcatattcttacgcatttctcagctgcagggacgactgctaattatcttcctgcctatgcaaaatgaagaaaaggcgagtccagaaacatgctaccgtggaagcacaaaactttttgaaattattctgggattaacatccccatcaatgattgacatttcaaaatttattgaatctcagaacgaatcacaggaaagttttgaaaccgttttcaaggaatcatggcctgaaactccatctgcttaaaaagcagtttacagcagaattgtgctgattaccatttcctcccctttccgttccatcatgattcaatacctgataatcatgaaatattccatcatcctcacatttgcatcttccctccttatttatgattcaacatgctatggagacgcctgccaaattaacggtctgagccaggaagagttgaaaaatctctcttatgaccctccaaggaatgaattgctttctgaggcacaagataaaaaggcatggcagacattcgttgaaacctatgaaatacctgtaggcaaggtacagaattggtataattccatcgtggataaaaattccgcagacgcagcggcaaaatctttttctacggaagtttcacctatccttaaaaaacttacaggacccgctgccgatatgaaaaagcaggttttatctattcctgcttcatccgagatgcaaaaatttattcttttgcgcattcttcagcttcaaagccgtctgctggtcattttcctacctatgcagagtgaaagggaaatggacgacaacacctgttaccgaggcagtgatcttcttttcgatactattctggaacctacagctcaatcagccctggacgttgccaaattcattgattcccggaatgaatcccaagagcatatagaagcttcatttaaagagccctggttcacatctgccgaataaattattaatagtgcaactattctaacctttatttggcgcaggatgtgaaaagcatctttccggaatcccgtcctctgctggaacaataccgggaactgggcctggcggacatttccccggaacagaggctcatcctgaaaggccgcggacgcctgctcgtggacgccatcgcagcggaactgtgctgacggatagtttttccgcctcagagatcagcagtctgcggaatccgatgcgaaccgaacactgaaataagcgggcatggtctactttgttccctgattttcaatatccaaggagcatcccgcaaaaaaagataccggtatctgcgtattcggattttgtttttttatcccggctctttgggaaagggatttctttttgtgaccgttcggctctctgcaaaaagattccatgcaacgggaatttcagcaaggggcgtttcacaaaaacaatccttcacgccggcaacacccacgtatttaatcaatctggaactggcgtgccatttttttcaaccaccagtcccggtgcctcatctcgtcccggctgcgttccagttcccgaagctcgctgccccgcatccctcccttcatatagcgttcatccagcttgcgcgcctccgcacgggtatctttccgcagagctttgtaaaactgggcccccgtcaccagcccgccggctgcaccgctccgacccaccaggttcatgtaaagtttcttcagcctgttgtaatcctccaccacctggttatatttcaaagcggcgtactggtaacgctccttccagtcctccggccccggattgaccagacggtcatccaaagaaccgggaaccggcgcggaagacggggatgccagccctccggaggataatgacgtaagcggcggaggctggggaacgggcctgcggcttgtcttgggaataccgccgaccgtcacggaaaggggggagcgttcctccagcagagcgtccatgcgtgcctgttccaacgtttcccgcagatgggcacgttctttctgcagggacgcgttcaagtcgcgttcttctgaaagcgactgcttcagcgaccgcatgccgccggacatttccgagtaaaccagcgcataagccccgatgcaccccagcagaaagcccaggcccagcatgatgcccctttcccgccacggtccaggactgcgttccggagccggttccgaaatgtccggttccggctcatgggaaacagtcaggtaatgttccagagggccctcgtcaggcatgggctgattcagggttgggacgggagaaacgtcggttcaggcctgttccgggcggatgcagtccgcgccgaaatacggcacaagcgcctccggaatccggatggagccgtccggctgctggtaagtttccagaagggccacatacagccgcggcagagccgtgccggaaccgttcagggtgtggcagaactggttcctgccgtcggcatccttgtaacgcaggcgcatgcggcgcgcctggtagtccgtaaagcaggaacaggaggaaacttccagatactgcccctgtcccggagcccatacttcaatatcatacgtcttggcggaggaaaaaccgaggtctcccgtgcagagctcaatcacccggtagtgcagccccagtttttgaaggatggattccgcatggctgcggagcacttccagctcccggaaggagtcttccggctttaaaatctgcaccagttccaccttgtcaaactggtggacgcggatcatgccgcggttgatgcggccggcgcttccggcttcccggcggaagcagggcgtatacgcggccatcttgataggcaggtcgctttcctgtaaaatggtatcccggtacaggttggtgaccggcacttccgccgtgggaatcaggaacatctgctggtcttccgtgccgtacatgtcttcctcaaatttaggaagctggccggtgccttccatgcactcccttttcaccacaaacggaacgcccacttcctgataaccgttttccacggtctgcgtattcagcaggaagttgatcagggcgcgttccagacgggcgcccgccccacggtacaccacaaaaccggagcccgtaatccgcgctccgtcttcaaaggaaatcatgcccagattcgcggccagttccacatggtccttcgggttttcaatggcgggcttttctccccacagcttgatttccgggttggccgtttcatccgcgcccacgggacattccaggtgcggcagattgggaatgttcatcagcagggaggtgagctgggctgcattttcctccgcgacacggtccagttcccggatgcggtccccgatttcgcgcacgcgcgcttcaatagaggacgtgtcttcccccttctttttgagcatgccgatctgcttggaggtggcattgcgctcggactgcaaggcctgcttttccgtttcggcattgcggcgcgcctcatcgcaggccagaacgtcatcaacaagcttccacgcgtcgccgctgcggggctttaaccgcgctttcacttcttccggattttctcgtattacacggatgtcgagcataacgcgcacagcttgcactccatccccccgccacgcaagccaaatgaacggccttccatggaaaaacgttaccctttcacggaaaaacgctgcgcgcagaggcatgctttcccgaatgccgcccctttccggaaactaccgtttttcccgtgtcagacaatgatttttttccttctcaggaaaaccgtacagcaggaggaccggactctccatgtttccgggaatcatggacatccggcgccagggtgtattgcaggaaggaccgggaaggaaattcctcccgttttcaacaggcggagttcctttcatcactatttgttcttgaagaatccgggcggctaaggatagtgtaaggacatcatgcaacaaaccgcacgcgccgctgtcctgacagcaccaaagacatttgaaatccgtgaatatcccattcccgccatcggagacgatgaaatgctgatcaaggtggaagcctgcggcgtttgcggaacggacggccacgaatacaaccgggaccccttcggcctctgccccgtggttctgggccatgaaggcaccggggaaatcgtcgccatgggcaggaatatcactaaagacaccgccggaaatcccgtagcgctgggggacaagatcgtcacctgcatcattccctgcggcacctgtgacgcctgcctgaatactccggcccgcaccaacctgtgcgaaaatgtgggcgtgtatggcctgatgcctgacgacgacgtgcatctgaacggctacttcggggagtacctcgtcatccgcaagggctccacatttttcaatgtttccggcatgacgctggaccagcgcattctggtggaacccgccgcagtggtggtccattccctggaacgcgccaagtccaccgggctcctcaagttcaattccgtggtgctcgtgcagggctgcggccccatcggccttcttcaaatcgccacgctgcgcacgctgggcattgaaaccatcatcgctgtggacggcaatgactcccgcctggaactggccagggaaatgggagcctcccgcacgtataatttcacccggtacgcggatctgaacgaactgctggatgccgtgaaaaaggacaacggcggccgcctggcggacttcgtctttcagtgcacgggcgtaggcaaggccggggccaacgcctggaagttcgtgaagcgcggcggcggcctgtgcgaagtgggctttttcatggatggaggggaaagcgttatcaaccaccattacgacctctgcaacaaggaggtgaccgctgtaggctcctgggtgtactccccgcaggactacccaactacattcgactttctgaagcgagcctacggcatcggcctgccgctgaccaagctgatctcccaccgcttcaagctggatgaaatcgcggaagccctggaaaccaacgtccagatgaaaggcatcaagattgccgtcatctgcggctagccggaaaactcttcatttcttcccatgccgccgtttttcaaaaacggcggcttttttacgccatctttccccgtaaaaaacactcagcctcccaaagattaatcatcatcccaatccagaaaacggcccgtattgggaggacaggccatagcggaaacgattttttccttcaaccgctccagtgcatcagggtcaagaaccatgggttcgctcgctttaaggcacaaacctttccggtacacctgcctttccaacgtcagatatttattgacgatgccattggaattcagggcggcgtcaacgacgaaatgcagcagataatcagcatctccaaggtagaaatcaaactcataaatccaggaaaaacagtattcttcgtcctcttcgcaaatcatttccctggcaggaattccgcaatcatacagatgattgagttccctcaacagggtcagaatatgctcacgcctccgcacggttacctggcatcccagctccccaaccatgccctgaaggcagtcgatgaccaaatcatcacactgttcttccatgtcaaggagaacttcccggacctgcgcccactgccgctccaatggttcctcggaatacataaaccgggcaaagggggaaggttcacctgccccagcgttccgtaatgccgccgtaggagtcaatgcggcggtcacggaaaaagggccagatgcggcggtggtcttccaatgcgtccaggtcaaggtccgcgtacaggatggcttcatcgctgacgggagccttcgccacaatctggccatagtagtccgccacaaaggactgcccccagaattcgctttccccttccgtccccacccggttgacggcgcagacatagcagccgttggctacggcatggccgcgctgtacggtttcccacgcgcagtgctgctgttcccccagcaggggcttttcctccggcagccagccgatggccgtggggtaaaaaatgatttccgccccctgcatggccgtcaggcgcgcggcttccgggtaccactggtcccagcagatgagcacgccgatgcggccgaatttggtgtcgaacgccttatagcccaggtcgccgggggtgaagtagaatttttcttcaaacccgggatcctgcggaatatgcatcttgcggtacatgcccaggaacgaaccgtccgcatccaccacccaggcggtattgtggtaaagcccggtggcgcgcttttcaaagccggaggcaacaatcaccacgcccagttccgccgccagtttcctgtgggcttccgtcaattccccgggaacaggttccgccaggtcgaataaatcgcattcctccgtcctgcaaaagtattccgtggtaaaaagttcctgggtgcagacaatctgcgcgccgttggcggcggcttcacggatggcggattccgtcttttccttgttcacggaaggccgggcatctacggacagttgaatgagtgcaattttcggcatgccccttccttaccccgtttcccttcccattccaagcagggaaaatgaacgtggcgcgattatttggtggaaaacggcccggaaagtgctatgaaattgcaatatggaacccgtcacccccactctgcccgacgacgacgtagccgccattgaccggctcggcgccatttacaaggagctttcctcggaattgagcaaaatgatcattggccagcagcgcgtcgtggagctgctgagcatcgccctgttttcccgcgggcatgccctcctgatgggagttccgggcctggcgaagacgctgatggtcagttccgtggcaaaaacgctggaccttagtttcaaccgcatccagttcacgccggacctgatgcccgcggacattaccggcacggacatcatccaggatgattccgccggcggcaagcgccagttcgagttcatcaaggggcccgtgttcgccaacatcgtgctggcggacgaaatcaaccgcgcccccgccaaaacccagtccgccctgctggaggccatgcaggagcgccgcgtcaccgtcatgggccgcaccttcaccctgctcctcccctttttcgtgcttgccacccaaaaccccattgaacaggaaggcacctaccccctgccggaagcccagctggaccgcttcatgttcctgattgaagtggactaccccacggaggaggaggaaatgcgcatcgcccgggaaaccaccggaacccggagcgaggaactcaagcacatcctctccggggaggaaatcatcttttaccaggatctggtgcgccgcgttcccgttccggaacatatttacgagtatgccgtgaaactggtgcgcgccacccgccccaccctggaaacttccccggaatgggtaaagcagtatgtagcctggggcgcaggcccccgcgccgtccagttcctgattcttggggccaagacccgcgccgctctccagggcagctacatcgtccgcagggaagacatagacgccattgtggaacctgtgctgatgcaccgcgtggtcaccaacttcgccgcggaatcccagggcatcacgccccgtaaggccgtggcgcgcctggcggcggaaatctgaccgccgtcccggcatcatcaatcccctttccctgccccatgaaatacctgaatcacaacctgctcagccgcctggggaaccttcccctggaagcgcgccacagcatgacggggaacgtatccggccgccacagaagcgccagccgcggctcctccgtggagtttgcggaataccgcaaatacgtggccggagacgatacgcgccgtctggactggaaagcgtatgcacggtcggacaggtattacatcaaggagtttgaagcggataccaacctgcgcgcctacatcgtcatggatctttccggctccatgaattatcatccggagcaggtggagaccaagtatatgcgcgcgtgcaggctggcggccaacctggcttacattgccatccggcagggagacgcggtgggactgagttttgcccggcagacgaaggacggcgccgcgctgcacatccccgcctcccgccgccccgcccacctgaacgtgctcatcagccagatggacacgcattctccgcagggggagaccgtccttcccgataccctgcatgaactggcggaacgcgtcggccgccgcgccctggtgttgattttctcagacctgttcacagatacggcggagcttaaaaacgccctccgccacctccatttccgcaagcatgacgtagccgtattccatctggtggaccagctggaaatagattttgactttgaccgccccatccgcttcgtggacatggaaggcggcggctccctgattacggagccggaccttatcgcggacgagtaccgggctatcgtggccagctatctggaagaaacgcgccggatctgcacggatatcaatgcggactaccgcctggtcggaaccggagattccctggaagacgtgctgaccggcttcctgatgggacgtcagaaaaagaaggcggccggataaatgcccggctgtctcacggaacggttgattgctccgcggaacggatgcaggatgcacccagacgctccccggattgcaggaagcgtctgtttttcatctctttccctttttccattgtggatgcacccgttaaaatgatcgtgggcctgggcaacccgggcagaacctatgaagacacccgccataacgcggggttcatggtgcttgaccgcctggccgcccggtggggggccgtattcaaggcggacaggcagcgcaagtgcgaggtggccgccggccccggcgtcctgctggtgaaaccctccacgttcatgaatgaatccggtctgtgcgtgggccccatgatgcggtttttcaaactggatccccgcagcgtgttcgtcattcatgatgaagtggatttccccctgggcgtgatcaagctgcgggaaaaaggctccgcaggcggccacaacggcattaaatccctcatcgcccacatgggcacccaggaattcccgcgcctccgtttcggcatcggccagccccgtggcaaaggggaaatgatagggcacgtgctgggcaaattccgcccggaggaacgcgagcttctggacgtgacgcttggcaaggcggaggacgccgtgctgtacaccatggaacacggcattaccagggcaggcaatattttcaacgctgttccaggctgacagccgcatgaaaggccgccccatttgcgccatgacgcatccctggacgggccggagagcgttttttcctgaagacggagcagtccgggctgcaggatgatacggctgcctcaggcgcccggcggcgtccaggaatactcagggggcgcgcatgccttcttttttcgcccgcccgccatgtacggtattgctaaacaaacgggaatccgttaggatttttgcaccttttcccctctcctcaggaccaatcctgcttcatcttcatggctgaattaagttcacaagctccccgcaggcacatgcaggccaacaaaaggcggcatcccaaggcaaagcccaggaaacgattctggagctttatccgaaagcttgtcctgtggtgcctggtgatggcggctatcggcgcggccgtgggatacttcggattcatgatggcctggaaacgttatgacaactgggcggcggaatttgatctggaacgcatcaatgacctggaaaaacccagcattatttatgaccggaacggggaggaaataggccgtatttatgtggagaaccgcagctacgtcacgctggacaaaatctcccccgccatgattaatgcgctgattgcccaggaagattcccgcttccgggaacatccgggctatgacttcctggggattctgcgggcaggccgggagtatatccacaacagcggggacgccaaccagggcgcctcctccatcacccagcagcttgccagaaatgcgtatgacctgaaaaaccgtgccaaagccaggaatgagggcagctttggccgcaaattcgtggaaatagcgctggcgcgccgcattacggaacggtacagcaaggaccaggttctggaattttacctgaaccgcgtttacttcggcagtgggttttacggcatccgggccgcttccctgggctacttcggcaaagagccggcggatctgaccacccgggaggccgcctccatcgccgccctgatcaaaaacccgaacggactttcccctctgaataatccggctagcaatctgaaatggcgcaaccacgttctcaaccgcatggccaaggagaaatacattacgccggatgaagcggaacgcctctccgccatggagctggggctgaatcccaagccgctgaaacgcggcgtctcccacatttacgaccgcatttcctcagaaatcaccgcatacctgggggaggagcgcgtcaatgccgccgggcttaaaatttacaccaccattgacaggcagctccaggaagttaccggaaaagccctggaacaggctctggaaaacattgaaaaacaacccggttaccgtcatcagaaggccgcagactaccacagcggttccgcgaacaagccgcgctatctggaaggagcgctgctggtggtggacaacaaatcaggcgccgtcctggcctaccacggaggcagggattacaccaagcgccagtatgacgccatcagggacggagcccgccccaccggcacctccatcctccctttcctgtacgctacagcctttgacacgggaaaaagccctgtcacccgcattctggacgatgccatcgacaaccgcctgacgggcatcggcggttcggaaggaatcctgggggaatggggggcggaaaactccaaaaaccgttatgaaggcatgattaccgcccaccgcggcctgtccgcctccaaaatcgccgcatccctgcgcatggggatggagatgggcacggccccgttcgtcaagaagctgacggatttcggcatccgcaagcccgtgagggaagcgggcagcacggaagtaaatcccgtttaccgccccaaaattttcgtgggcacggagcctgcctccctgaaggaaatgacgctggcctacactgccatcccgaacgggggttcccgccctcaggatatttactatctggacaggatagaagatgaagacggccagctgatctgggaatccacccaggcgattgaaacccggaacaatgcccagatacggaagggggccacatccacagccacggctttccagcttcacaacatcctgaattcctccctgaaaaacggttcagcccagcgcgttgccccgtatctgccgaaaaacttcaagggcggcgtgaaaacaggcaccacgtacgacttcgcggacaactggctgtttgggtatgacagccgcattacctgcggcatctgggtagggttcctggaaggcaaaaagcccatttatcacggagccttctcgtcagacacctgcgcttccgtgctgggcgccgccatcacggaagcggaacggcagttccctgccggagaactggcccctccccccagcgtagaacgggtggaaatctgcctgaccaccgggaagagggccacgcacagctgttatgacattgacccgtcggataaaaaataccgccgacacaccatattcgaatacctccgcaagggggattccagcctgcctttctgcgacctccacggggaggacgtctccgcacccgtctccaccttcacggcccagaaccgcattcttcccctgccgcccatcctgcccaccaggcccatcctccagggggacgatccctaccatacggagctgaaccaggtcccggccaaccgcaactttgaactgctgggggctggcgaaaacgtgccggaagcgcaagccatttccgcagatcccgtttcttcagaccatacggatacaagcattacgctgccggcgcccaggcccatcaccattcccgtgccggaattcatccacctgtaactttttcccctcatgccttccccatcccaggacacggtagcctgcacatgcccgtcatgcggcaacctcttcgccgtgaaggcgtcttttctgggacgccaggtaaaatgccccatctgcaccgcttcagtcacagccaggcaggaagaaaagcccaggccggaaacggaagaacaggacgccgtcccctgcctctgccatatttgcggcaattcctttgccgtcagggccgcctgcgtaggcagccgtgtggaatgccccgtctgccactccgctgtcacggccgtcaaacgggaagaagcgctttcaacattcccgggccggacgcctgaagctgcagagaaagcgcccggaaatccgaaacacacggctattccgccatttgccgccggtgttccgcacacttccgcgtactccgctccgcatacaccgctcgcaccaaagaaaaagacggacaaacggaccatttccgttcacgggcccaccactccgggccccaataaatccacgacaaaaatccgtaaaaggaaagagggaaacgccgctccggccattgccgcgccacgctgcgccgccctggccccggaagagccggaataccgcgctgccgccgcggataccatgcgcagtgaacgccggcccacctggcatatatggctttttgtcgcgggactggttctttcccttctgggcgtgttcatgttcctgcgcgggagggatatggaagcggaaaactccaaacttctgaatatctcagaccggttcgtggatcatgaagcgctcttttcacaggaagtgaataaagacctgctggagcaattgcagcagagggagcggcaatacctcatagcccacagccgcagggaggaagaccggaaggcggaatccatttccccccatattacggcggccatgaatgaactggccctctactgcatggcggaatcggatgaagagaggctcaactacgtaatgaatcccgcagccgtagcccccaaaatggcctattgggcctcctacggccaatacaaggactacctgccccaggaagcgggcagaagctccaaaaacggggacctgcttcagatctccgtgctgatggacgacaacactatccgccctgcggttttcctgtatgaccggaattcaggaaaatggaagctggactgggaagcctgggagggctattcccccatgcttccggcggagctggaagccaaaaagccctccacccccgttcccgtcagaatcatcctaagcatgtccggcatttatcagccccctttcctggaggaatcctccgcggaaagctaccgcaacacgtcatatctcaacttcacccttgagttccccaacggggaacgcctgaatgcgtacgtggacaggtattccccgcttgccctggaactgaccaggctgctttacaacggccccgtgcgcacctgcgtgctcatccgctatccggaagacctgcccggaaaccgggccgttattattgaccagcttctgcactccggctggatgagcgacgccacccgcaggcttcttcccaccaataattgaaaatcaaaaatcggttcccgctttccatgagttccaaagcactagcgcaaacacaggacaaagccctccaactcaacctggcttccaccatttacggcacctttgcggaaatcggagccggacaggaaacggccaactggtttttccgggcatccggagccgccggaacagtggccaaaaccatttccgcttatgacatgaccgtcagcgacaccctgtacgggccggtcaagcgctacgtttctgaagaacgactgaaaggcatgctggactacgaatttacccagctcgtcaaccgcctgggcccccagcgtggcaaagacacccgcttctttgccttctgcaatacggtaaaagtcaaaggctaccgggacaacggcccctggcatggctggataggggtgcgcttccagctgaaaccggaggcaaaaccgtccgacctgattattcacgttcgcctgaacgacccggaccacgaccgccagatgaaggacctgggcatcctgggcgtcaacatcctgcacgccgtctttttcaaaagggaccgtctggaggaattcattgaatccctggtggacaatctggatccccggctggtggaaatagatgtcgtccgttttgaaggccacggtttttccatggtggacaaccgtcttttcgcgctccagctcgtccagtccggcctgacgccggccaccctgttcctggcgaacggccaggtggcccaggcggcggatgtgctgtacaagcgccccatcgtgttgatgaggggcagtttcaaccccgtctgcaatctgcatctggaagtcatggcccaggtgaaaaaaaccttcctctcccacatcaatgagacgcaggcggaccgctgcatggaaatttgtgaaatatccatgaataacctgctccgcggcgatgatgtggaccatctggaattcctggacagggcggacagcctcaaggctctcggcaaaaacgttctgattaccaaaatggcccgtttcgacaacctgtccgggctgctggcgcgctacacgagagaacccattgccatcgccctctccatcggcctgctgaatgagctgttcaaggaaaaatggacggaggacattcccggaggcattctggaatccttcggacgcaccttccagaacaaaacgcgcctgtacgtctccccgtggctcaaccgcaaatccggggaattcgtcacggcacgcactttccgcgcgccggaacaatacgtgcacctgtaccagcacttcctggcgaacggcctggtggtggacgtgccctttttcaatgaattcctgctgcgccacacgccgcgggacatccagcgcatgatcgctgcggatgaagacatctggaaaacgctggttccggaggaagcgcaccgttccgccctccacttccgctgagttccttttcagcaggccgccccttcctccccgcggcacggccctcccaatgccgcggtctctccgttcctgaaaccggataatccggcacggcccctcccgcctgccctgccgggcttcccgccactggtcaggaaaacttaacaattccgtaagattgtcttgccataaggcaggaatctcattaaggtcttcgagttccatttttatcatgaataccattattatcggctcccaatggggcgacgaaggcaagggcaaaatgatcgatttcctgacggaatccgccgacgtggtggcacgcggccagggcggcaacaacgccggccatactgtaattgccaatggaaagaaatatattctccacctggttccctccggcatcctgtggccggacaagctttgcgtcatcggtaatggtgtggtgctggaccccatcggcctggtggaggaaatcaatgaactccgcggccagggcgtgaccattacaaaagacaaccttctcatctccgaccgcgcccacgtggtccttcccttccacaaggaaatggacgccgcccaggaatccgccctcggcaaaaaagccatcggcaccaccaagcgcggcatcggccccacttacgcggacaaggcacgccgcatcggcgtgcgcatggcggatatgagggatcccgcgatttttgacgaagtgctgcgccgccgcatcaagatggcgaatgcggaaatggaacgcatgggccttcccgctatggatgaagaaaaaatggtggcggaagtaagcgccgccgcggatgtgctgcgcccccacatcaccaacaccattccggttatgcacgaagccgtggcctccggaaaaagcatcctctttgaaggggcccagggagcttacctggatgtggacttcggaacctatccgttcgtcacctcctccaacacctcttccgccggcgcctgcaccggcacgggtgttcctccgcacaaaattgaccgcatcatcggcgtctgcaaggcctacaccacccgcgtgggcgcaggccccttcgtcacggaggatgaagacatctccaaccatctgcacagcatgggccgcgaattcggcgccaccacgggccgcccccgccgttgcggttggtctgacggcgtgctgctgcgcttctccgccatgttcaacggttttgatgaaatggccatgaccaacctggacggctacgacaagtgcccggaaattaaaatctgcacgggttacgatctggacggggaaatcctggcttatccgcccgccacagtggatgaatgggaacgctgcaagcccgtgtatgaaacggtgcccggctggatgcaggacatttcctcctgccgttcctgggaagagattccggaacaggccaagaaattcgtcaaacgcatgagcgagctcatcggctgccccgtcacaaccgtgggcgtaggccccgaccgcgaacagacgattgccgtgcaataaacctcggcagttctcgttattatttccttcaaagcagttccgcatacatggcggaactgcttttttattgtcagctaataaaggccgaacacacgtttcaacgctttctccgccaccgtttctccacggcagcggcatgggaaaaacttattttccaccctgcatctttgcatgaagcgcggaaatgcctcctctaaaacacatgaaaacggcaattttgccgcttccaggtcaggaaaaaacaaataaatatcatccaaaacagcccagcggaactggtgaagctgccgttggaaagcccatgcctgggagttcccggaatgatttgacggatacggatacttccctcctgatgataataaaagaggaggcgggatctttcccgcctcctgtaaaacagcaattggactccccggctcaggcacatctgcggcgcatcatgagggcagccagaccaatcaggctgagggatgccgtggccggttcgggaacggcagccgcctcaatggcattaagattggcttcctgggaagcattagcctgcaacgtggtattatccacgacaaggtatttgacgtaatccgtgccataggtaaatgaagtcagggctccgaacccgctcgctttcaaccctgaatcctgaccaccataagtggtggcggttccttcggaatcaaccagggtcaggtaagtccaggttccggtgctggtaatctgataagtgatggcggcggattcatagctgttttcggtgaacaattccttcaatcccgtattcaaattgagttcagaaccgttgacagaagtaatcgtgcggttgtagttctctccttgccaggaaccataaatgcccgccgtgggagttcctgaagaaacgtagttgaggcccaggccgatcatattattattggcggaaaaaatattcgccttgacgttacctgccagaatggcgttttggaaagcctgagcgtccagggccatggtcacggagaaattgccgtaaccggagtttataccctccgtcagggtatatgatccgcctgctgcctgcaattcactggaatccaaagtaaggacggttgccccctgaaccatgagggaagaagctactacacaagaaagcaaaaataatgttttcttcatttgactgttctaggttgaaaagaaaagagcgacgcgctctcccagtgcggtacatataggggatttagaatccgggaacaataacaaatattgaaaatcaacgtctaattcatcttaatcagttgttttttaatatcatatataatttctggtctttttttatttcatcttatccgaatacaggtaaatatgttatgagaaggagaaaatatttaagtgcgcagcggattctaaattcgcaataaaaattacagagaaaatctgatgcttttttcccgttttacattccttttggctccctcacccgacgtacattcagacagccccctgcaaaaaaacaataatctccctaagctaccatgttccaactggttccacttctttttcggaaggaatacggcggtgggagctgcccctccgcttgccctatcatgcctgtcttaggaaaaggcccctgaaggacagcccgcctttcctttttccggaaagacggtgaaaaacggatattcgtgtcagcatttaaacggagttatgatacttccgggaaaagccttgtctgactgtctgtatgagacatgccattcttccctccatgtgcgctgttgccgtcgcagcctcctgcagtcccacccttgcccaacaggcggctcccgctgcggcggcttcccctgcttacctgaacacggaacgcggtctgcgcgtgaaaactctggaaggcagggaaataagccccagcctgatgaaaggaatgcgcccggaagaacaaatcaccaaaaggacgcccggcgttcccaccaggcccagcgtactgcttcagcatgaaggcggaacttccgctcccggcctggaatggtttgcggccaggccccttaaaatgatgccgtacctggacagttcctacgttttcggcaatacctgtgcggaaccgaacgcctggatacgcgaagacatgatttccaccggagcgcaaaagctcaagaccgctctctccagatacggcattacttattccgcccagttcggattcaactacacggggctgacgggcggcggcctgaacggaaaaacggatttcccctcctacaatggttccctgctgaccaatatcaccatcttccgcaatcattccacgggcagcggcctgtacctggcctccgagttcgacttcggcaacggctttgacttcaatgaaggcagtaaaggccccaaaaccacgctgggctccctccagaaccccaccagctccttccagggcccggacccccacctgagcaacctgagcctggcatgggtgggagcgggaggaaagcttctgctgatggcgggccagctggacaccaccaactacatggaccacaacgcttacgccaattcccataacaataacctcaccaacagcgttttcggcaataatcccgtactccccctgacggataattccctgggattccatttcgcgtggcagccaaccacctccttttacgtgatgggagccaccgccgccaataacatggctcaaaaccacaatcctttccggaacctgaattccgacaattggacgaacgtgcttgaattcggctacgtggcggaagatttttgcagcatgggccccggcgtgtaccgcctccagccctttttcaccaccagcaacggtgaaaacgggggcggcgtggccgtaaacttccagcagcagctgggccgcagcagccacctggggtggttcttccgcggcggctgggcaagcgatgacgcagccacgctgaccggcgtacgctgcgcggccaccacagggctggtgcttctttcccccttccggggaaagggcgcatccaatgacggatacctgggcctcggtttcctctggcagcagggggctaaaaagaacggcccgtacgtgaacaggaatgaatacggcattgaattgacgtatgtggcccaggtgacgcccaccatgacgctccagcctgatattcagcttgtcaagaatcccgtcaacggccgcaggggccagacggcggtggttttccagatccagaacgtctggtcctggtaaaagcccttccggaaaactggaaaatattgatcgcatttcccggaaatcctgtctaaatggaaatgttcttatttggaccacgcacatgaagcgcattcagcaaccttccatgcaggaggcggagcaggcctccctgaatcatgagattttaaatacatggcgtcccggggaaactctgggggaacacatggagcgccgcggcgtcagccggcgcgaattcaacaagtggtgcctgaaaatgatctccctgatgggcgttgccactgtaacgggcggcatttccaacgcccaggagattgcggacaagatggccgcattgaaacgtcccgtagtcatctggctccagcttcaggaatgcaccggatgcctggaaagcactatccgcagctataacgaggaaatcggggacatggtgctttccgccgtctccatgccttacgtggaactgctgatggccccttcaggagaggccgccaatcaggctctggaagacgcgatcagggagccccacatcctcgtcatcaacgggtccgttccggttaatgacggtggggtgtactgcaccgtggccggagataccgtggagaacatgctgcgccattgcgcggaaaacgcctcccatatcctggccgtgggttcgtgcgcgtacttcggctccatccaggccgcccgtcccaaccccaccggggccgtgggcatccgggacatcctgacagaccgcacggtcatcaacgtgcccggctgcccgcccatcggggacgtgattacggccgtcatcatgtacatccttacatttgaccgcgccccggaatgcgacctggagtcgcgcccgctgatggcatacggcacccgcatccacaataattgcccgcgccgcgcccatttcgacgccggacagttcgtcaacgtgtttgacgacgagaacgcgcgggaatgcttctgcctgtacaaggtgggctgcaagggcccggatacgttctctccctgccccatcgtcaaatggaatggcggcgtcagcttccccatccagtccggccacccgtgcatcggctgtacggagctgtacttctttgaccgcatgactccgttttacaagacgctgccgaacgtgaacggcttcggcgtggaagcctccgccaacatcatcggggctgtgggcgtagccggcgccggagcggcaatcgccgcccatgccgtgggctccgccattcattacaggaagcagcacatgaaggaggaagcaaacgtctctctgcccgccttcggggacgctcccggctcgcccgacaaggacactgaagaatagccagaagccctcaccaccagattaccatgagcaattacacatcagcggacgttccggaatccagccgggtggtcattgacccggtaacgcgcatcgaaggccacctgcgggtggaaatggaggccggggacggtgtcatcaaaaatgcctggacgtccaccacgcagtaccgcggcattgaggtgatcgcctgcaagcgggacccccgggacgtttgggcttttgtggaacgcatctgcggcgtctgcacgggtacgcacgccatcgcggccctggctgcggtggaagacgcgctccagtacccggtgcccgtccaggcccgcctcatgcgagacctggtcagcggagccctgggcatccaggaccacgtcatccatttttaccagctccaggccatggactgggtggacgtgatgtccgccctgaaggcggaccccgcggaaaccgccgccatcgccaagtccctttccgactggcccctgtcctccgccgcgtatttcgccggagtgcagaagaagctgaaggactccatcgcctacgggcaatattccatctttacgaacggctactggggccatccggcctacaagctgccgccggaggtgaatctgctgggcgtggcgcattatctccaggccctggtctggcagcgggacatgatcaaaatccacaccatcctgggcggcaagaacccgcacccgaacttcctggtcggcggcatggcctgcgccatcaacatgaacaatgaccaggccatcaaccagttttccctgagctacctgaagcagctggtgcaaacctgccacgatttcattcataaagtatattatccggacattgtagccatcgccggattttataaggactacgcccacattggcgcgtccaaccccaactttttctgcactggggctccgtctgaaatcaacacgggcgcccccgccggcaaaggcatgatcaagcccggcgtgcttctgaatggggattacaggaacgtgcttccctttgaccaggacaagatcagggaattcgtcaccagctcctggtacaggtatacggaaggcagggacgcgggcctggctccgtatgacggggagacgaatgcggactacaacggccccaggccgccctacaagtggctttccgaccacccgcagtacacctgggtgaaagccccgcgttatgacggccacgcgatggccgtgggtccgaacgcccgcatgatgattggctacgcccagggggttcccgccatcgtggaacgggtggatgccgcctgcgacaagctgggcctgccgcgcgacaacgccttcatgaactccacgctgggccgcgtatacggccgtgcgctggacgccctgatcaacgtggacatgatggtggaccagctccaggaaatgacggaccgcatcaggaacggggaaacctccaccttcaacccggaaaaatgggaaccggaaacctggccctcctcctgcaagggcgtgggctgggtggaagcgccccgcggcagcctgagccactgggtgcggattgaaaacggccagacggtgaattaccaggccgtagtccccagtacatggaacagttccggacgggacgcggcggggcagatggggccatatgaatattccctggcccataccgggaaacacccgctggtggacccctcccgcccggtggagcccctgcgcaccattcacagctatgacccgtgccaatcctgcgccgtccatttgtttgacgaagaaggggaggccattctgaccagacaggacccgtgaaaacgactcttatcgataacgacctcaccctggcggtggaggatgccattccggccagtccggtgtacgctccggaagaaatcctggctctggccgtgtgcgcctcccccaacggcagcagggacgcgggagacctggccctgctccatgccgcgcgggaacgcggcataaccctcccttacgcccagcgggaaaactcctgggaggctccctcccgggaaaggccgtacagcacggctgttctgaaagccgcagacaaggcggacgcctcccctttcatggtagcccgcggcaatctgaaggcgctggaaaaactgtgcgaagtcagctccctggaaaaggagcgcatgaacaaggcctttgaagagcattccccctccggctttgaacccgtggccgtggccgtccaccggtccggcgcgccgtggcgcctgttgggcgtcgtgcccatgcacgccatgagggatgtgcgccgcctctccatggccaaggccaatttccgctatttccacgtctgggactggcctctgcgcgtgctgcactggacgtgggtgctctgcatcatcggcctgtccgccacaggcatctgcatcgcggaagggtggttcctgaaaatgggggatctgcacggggctttccaattcggaacgctccgcttcgtgcattacgcgctggggtggattctggtggtggtgatgatgctgcgtttttcctgctttttcatggcctccaacaaataccagagtttccgggccctgttccccgtttccagacaggagtggaaggatttgtacgccacagcggtggactacctgttcgcccgcagttatgacggcccccgctacatcggccacaatcccctgcagcagtggacatacacgggcgtgtacgtcctgttcaccaccatggtggtgaccgggctggccctgtatgccctgtatgagccgcgccactggttctaccgttggttcatgccgctgaacgacttgataggcattccgtacgtgcgcctggtgcatttgatcggcatgtggtgcttcatcatcttcgccatgatccacgtgtacctttccatcctttccgggaacgtggaccgggacggcaccatctcctccatgttcagcggcggacgatggctgcgcaagggcgtcaaattccgggatgaataacctctctgccctccccttgacatgaaattggagccatacacggaagaactgcggggctgccccgtgaagggaaatgcctatcccgtgctcgtgctgggcatcggaaacccgctcatgggggacgacggcgcaggcgtggagctggcccaccgcctccaggaacgggactacggcccgctggtccacgtggaggaagggggaacgcagggcatgaccctgcttcccctgctggaagatgcggacacgctcatcctgctggacgccgtcaggacgggggccctgccgggaaccgtcgtcacgcgcagccgggaagaactgccgcgccacttttcccgcgttatgtctccccaccagataggcatgaaggaagtgctgggggcggcccagctgtgcggcaccctgccgcgtgctatcacgctggtgggagtggaggccctgcatacggatttctgccgccccatgtccgcggaggtgcaggaagccttgccgaaggcactggacacggcggaggccctcatcgcccgcgccctggcggaacatcaggcccggaaaaacgcccatgcatgaagtaggcatcatggaaggcgcgctggacatggcccggcggcttatggaaaaacgcgggggaaacaggctgaggcgcgtgcacatgaccatcggcagcctgagcggcgtggtgccggaagcccttcaatccgccttcctggccctgaaagactcgtatgcggcgcaggatgcagccctggacgtcgcctgggtggaggccgtgtgccgctgtgacgcatgccgggcggatttttcctttacagaacacggctacatctgccccggctgcggagaaccggccctggccatcctgcgcgggcgggaactggagctgacccgtgtggagtgggaatgaacagtgccccttccgggaaaaataagggaaatttacgcgaacactttccccggacggatggtctaataccattggagcgcatccatcgcgcctcaaacgtcaaaccaactatgtaaccagagccatgagcaatatcaacccattcattctaacagggatgatgccgctttcagcctcatccatgaaccgtgtctcctacatgtgcccggtcaccatcagcaatgatgtagtgcagggccagacggacattcaggattcccttaccgttgattccggcggaaatctttacatcatcaacgctcctgtttacgtgggcggccccaaccagccggaccacgggcaccgcaccgcccacctcgtcatccggaacggaggcgccatgacgctcctgggcaatctgccggatcatatgaccgttttcctgggggacaaagccaacggcagcctggaaatcaacggcggccgccttctgatgggccaggggcgcattcagggcaccagggagcatgaaggcagaatcgccatgacggacggctggctcttcgcctcggaagtggatctgccggcggagggctcggaactcgtgatcaggcacggcctgatgcgtatcagaaaactctccggcaatgcatccacccgcatttacggaggcgttctgcacgtaaaggaggaagcccgcgccagccgcatccatctgatagacgacggcgtgctgctgctgggcagcgtcaccagccagccttccgcggacgtcatggccggagcgggcatcaacttccgcggggacggcggagcgctggtaatccgcatcccccacccggaaaacgctctgacgcgcacgcgggaagcggaacatgtctttgacgaactgctccggaggggcaagctctttcatgacagtgaacccatgaccagcttccaggggttccatatgagggagttcacggggcatgacggactggcgtacgccgcgctgcgcccctccgcccagctgaacgcggaacagaatcaggttacccgtctgctccatacgttcatgtacggcggcagtgaaaaggacatgcccatctgaacccctccggcaaatggaaagccctcatcaaaaaaccgccggcattccgtaccggcggttttttcatctgttgatctgctgaaaaacggaaaaacgttatttcaggaatttaatcgtgaagggagccacataatcgtaattcccgttcgccgccttgacggcagcgataatggagaaaacgatccaggcgataaccaccacgggggcgagcacgaacccgatcaggatcaaacatgaaagacaggccgcaaccgtataaatcgcccaggaaatctgggcattcagaatattctttcctactttgtccaccagagggttggcatccttccagaccagccagcagatcaggggcggaataatgttcacgccggcggagcctccgaaaaagacggccaccagcggagaaaccgccgtcaggatagcctgcgttttatccgattgtttctcaggggcgggctcctgaaccggttcctggatgatttgttgttcttcgtccataaaaataaagagatggaaagcggatgaaggaaaacggaaaccttttccgtttcattccgccttgatgagaccttttttacatattcctccccgtagtcaagcttccagaccgtccgtcccctgaataaaaaacgttctccagcaatcatccttgccaccaagcaggccggaagccatactgccgggcatgaccaatgccctgacgctgctcgtcttctccgcctgtctgggagcctgcgccccgggaataccggaaatcccgcctcccgcttcttccgtcacccgccgtgaaaccctggcagccagccgggcctatacctccatgatttggaggggctctctccggaatgtccgccacggaacggacggggacggcatccggacagacacgccggacgcctccgcagccggatatgatgccggagcatggtggaaaccgggcatgcgttccatcggcatgccgtacaaatggggcggcttcgacaccccgcgacagttctccgaacgcctgaaggcggatgccgccaacggagggcttcccgctgcggccggcgacatgggcaccccggaaaagcaggccgcgggagacgccgccgtcagccgctttgccgccggagtggactgctccggcttcgtctcccgctgctggcggctggacaggcccttttccacacgggaactccccgccctctgcacgcggcttccctcctgggaagacctccggacgggagacatcctgattgtgccggggcgccatgtgctcctgttcattcagtgggagggaacggaaaagagcaggttcctgggcagtgaagccggccccctgccggcctggaaatgttcggagcatgtgttcagccgctccatgctggaaaacagcggttaccgccccatgagatacaggggcatgcgggactgaaaacaagttccggaacatccgtgcccctctttctttcccggaacaggaataagggggaagacatcgggaaacattccggaagttttcctctccccccttccataaaaagaaacccggcatcccatgcggcagggatgccgggctgcaggccgccccgtcaaaggcggcggcctggccaaatgccgggaattacaacggctgtacgttcatatggaacaccttcccctggaaggaggagccaagttccttcagaggcagaatgaacgtggaacggtgaactttgggacgatgcttgaatttgtccgaaaaatccttggacttgtcggaaaaattcttcagcacggcagttccggcaggttccccgtcaagcaacaggctggttttctccggttctcccacaatttccaccttgaccttcttgcctacgggcagcttggcgccgaaggaaaattccagagaatcgtcacggcggaatccgacggtgccgtccttcatgaccgcaagcaattcgccctcaggcgcggcaagcagcacctgctccttcccttccggcgcggcagtcaattccagttccatggtcaggcggtaattcggccccagggcaggtttgtccagcttctgggggagggaggaaggcttcaccgtcaagggctggctgtctttccatttgtgcaggggattggtgcgcggagcgttgccgatggaggaaaccagctcgcgatgctgttcaaacgtatccggagccttggcggttccccacagtttctggctgagcacgtccatggaaccggaaatgatcccccaaatgtcataaggcgcgtaccccgtatgcataatgtccgtttcatcattccagacggcgaaggtgcccccaaggagctggggatgcccggaaggcagcgtttcattgccgatgcggttgggaatccagttattgtacagccccttatggtttctgtccatccggtagtagccggcaaaaggaacgatataaagggctccatcgttcgtattgatcacatcatagccctggttgacggcttcccatgctttcatccagccggtgctccaaaggttcatctggacccctttgctgactaccggggtcttgcccggcttggcgctgaggcttccccagatgcggggcgtataaccgcgcttgagggcatggctgagcacggcgtttgcaaagtggcggtaatcttccttgtccccataaaattcatccgcccccacatgcaccacgccgcagtccgcgaacacgggacggcccaacttgggatccttcagcatgtattcatcaaaaaccttgctcaccaggtcgatcgtttccgggttggcggcgtccagcatctcgcagcggcgcttctcatgattcatgggccctttataaatgagatcaggccgcaggcgcgtaaaggaaagggcatgacccggcgtgtcgaactccggaacaatattgacgccgtactttctggcatagctgaccaggtcggcaaattccttcttggtataaaaaagatccttggctgtcaggggcgttccgtcctttcccttcattttggattccagacggaaagccgcatagctttccttgaacggatcatggccgttgtccacatagtgttcgtggaaaatatagttgttgttgatgaccaggtgcaggtcattcatcttgtaccaggccatggtgcggatcacgtccttcaggtaactgagggggtaaggcgtgcgcgcgacatcaagcatgaacccgcggagctggtagcgcggaaaatccacggccgtgccgcagggcacgctgccgggcgtctggcggagcatctgcagcagggtgcgcgtgccccaaaacaggccggtgggagccgccgcaccaaggcggacgccgtccctggcaatctggagccggtatccttccctgcccagattgccgcccttcaacagggaaagggaaatatccgccttcgccccgggggcgacaagcttgaccttcttccccagcacgtcttccatatccgccgcaaacaatttgcccagctccttgtccgggcatgctatggtgaccgtattccccagcttatattctccctctccccccttccattgcaggatttccgggataatccgcggcttggggttgccctgggcggcctgaggagcctgcagcatgatttcataatccttgctgacggcttccttgccgtccttggtcaccttgaagctgacgttgacgggggtatctgaaataacaggggctatcttgcctttactgttgacgagctgctcatagtcggcccccagcaatttaatctgggctccggaaacgctcggcatgggcagttgcttcgctccggctttcaccggagggatggaaagggaatccgcaatctgcttggcgtcctgccccatcacgggagacgcggcaagaacggcgatcatcaggaataggtttttcttcatgttttagtcttgtttaggaaaaggaaatgtctgatttgctccaaaaactacgcgcccgccgcccctttcttgcagagaaagggagaaaagcggaagaattctccctctctcaaccgggcgggacggacattccgcccaaacggattgccgcgcgccgggcttcatgaaggaaaaccgtcggccaagagaggctttccctcctgttccaataaattattatcccaaagaacccgttgttggcgagataaaaaacgtggagccccgggcttcagggaaaaaagatgccgcacgacggcaaaacgcccccccacggcaaaaaacgggaacgggccgtccctattagggcggcccgttccggacaaaaaataaaatcaggcgcggatatcaatcacctctccggcgggaaagcgcaccttggcctcgcgggcataagcgtcatccttggcgcggtagcccagagccacccccaccacagagcggtacggcgtaccgtccaggcccaggatttcatcatacttggcgcggtccatgccgccgatcgtgcaggaatccacccgcagggcggcggcggcgctgagcaggaaccccaaggcaatgtacacctggcaatccagccaggcatgcatcttttccggagccagagcctccacgtagctggtataaaaatcggcggaggaagccagtttttcagcggagggtcggcgcgtgaattcaatctgggccaggtaacggtccacatcccgcctggtggcgtcgcgccgggagcacagcaccacgtaatgggaacagtcctccacctgggactggttccaggaaacctcccgcaggcgagccttcagttccctgttggtcacgacgacaaacttccagagctgaagccccagggaggagggactgagacgcaggctttccgccagcgcatgccaggtgggctgttcaagacgggcttcaggatcaaattttttgcaggcgtaacgccattccagaccgtcaatatactgttccggggagatcatcatgcagggtgagacacgaaaaacggaaaaactgtttaaagaacctctttcaatacctcaatgcagcgggcgttctccgcaggagtgcccacgctgatgcgtatccattccggcaggccgtaaccgtcctgcgcgcggacgatgactcccctggcaagcatatcctggaacacctgcttgccccggcccactttcaccaggataaagttgccctggctgggaatccattccaggcccatttcccggaaagcctgctcataaaaacgcatgccttccttattattctccacagtgcggcgcacatgctcccggtcctccagggcggccagggcggcctcctgggccagaacatgcaggttgaacggagcacgcgccttgtgcagcatgctgcaaaccggttccggcgcaatgccgtagcccacgcgcagccccgccaggccgtaagccttggagaaggtgcgcagaacaaccacgttgcggccttctcgcacaaatttgagggtatccggaggattgtcggaaaactcccggtacgcctcgtcaaagaccaccagcacatgttccgggaccttcgccatgaaatcgtctatttcctgctgtcccactacggtgcctacgggattggtgggattcgtaatgaacacgacgcgcgtattctccgtaatagcggccaggaagccgtccaggtcatgcgtccagtcctccttgttgggcacttccacgtacgcggcgccaaacagcttggacatgatagggtacatggaaaaggcgtgtttggcggccaccacctccgcacggggattcagcagggcatggcagatcagttcaatcacttcgctgctgcccgtgcccactaccgtctggccgaactccacgccgcagaactccgcaatagcggaacgcaggcggaaagccgctccgtccggataaatgttcacgccggcagccgcacgggcaatcgcctccaccgccttcggggacggccccagaggattttcattagacgccagtttcacaatatcatggggattcaggcccagttcccgggccgtctcctcaatcggcttgcccggctgataagccaccaactccagcacatgctgatttgcgaaactctcaatactcatagcggcggaatgttaccgccattccccgtttctggcaatacggatttccatccggccggcccctgggaagatgacagccgtttagagaatctgcgctggcggaaaagtggaaaccttttccggaatttttccattcttcctgcaacgcccttctaccggagaaaggcagccgtccactttctccggcagatttccgcctgcttttcatgacggaccgcccaaatatgaaggagcacagccccggaattcttcaatgccccataaggtcaaaaacatttcccttaaaaagcgagacggcattccgtgacggacggtaaaccggccccctgccctcctattttttacggctgcggcccctgcgcgggcggctgcgcagggtctggtacccggccacgacaaaggcgaacgcagtcaccgccagaaaggaacggaacagccaggccagaagttcccagtaaatctcctgagtcatgcggaaggttttttaccggaatcgggaacgttccccaaatcttcccggaggcgtttgacggcacaggcaatcagggtggctttatccagctggcagcgttccatgttcagcgcgtccgcttccgcatcccggaaaaaatggaccgataacggcattttccccttgatttgaatttttttctgactcttttttttattttccgtcttcataaaaatcctttttttggtgcaataacggccttaacagcccttttgcgcccctacaatgcacctgaaacggtatttcagtcaacaaaaatataccattaaaatgactttatgcaaaaaaggttgaaaaatagcaccattttcgttacaaagggtgcatgagtgagaatcaggacgaactcaaagtgcagatcaaggcttggctgaaacagcagaacatttcccgcaatgattttgcggcggaatgcttcgtgtctcccaacacggtccgcaactggcttgccaaggtggccatccccaaagacaaggaagctctcatccggctcatgatggaaaaaacggaaagggagaaaaaactgaaagaggcggcaagagccaattggaagccctttgtcgtcatgctgagttccgaggattacaaactcatcgaagaagccgccagaagggacaacatgacggtggaggaatgggcggaagccaccctgatcaaggatgcccagaagaggatgaaaaattattacgacgacagcagccttccggaagatgtatccctggcggcggaagtaccggaggaatacggagctcccagacgttccggcccttcatcatctccgccctcttctgcccgccgcaagccgcggcaataaatcctggagggcatggcatcccgctgatgtcccgcctgcctgccggcttccgccagcgtgctgttccgcggagggcttccccaggcgccgggaacaccgatctcctttgttgtgcgccgaatcaacttttctcttgcttgccgttctccaaaagttctatttccgttgactgtgagtcaattattttatctactgctttttcccgccttttgtttcccgctttcggcccgcgcgaaagcggttccgccgtctgttcccgccgtctccgtcaggatggtgcatccggacagccaggagctggaccgggaaaggagccctattccggaaggatacacgccttatacatacgaattccgcgaccgccatggaaaaatgcagcgggaacggctgttcctgaaaaatacccccatcatcacggaatcggaagtggaacaggcaagaattgagccggagagaagagaatgcctccacatcaccctgaatacacagggcggaaaaaccatgaaagcggcaacctccgccatgaatctgggccgcgacaggctggccctcgtcgttcagggaaaaatcaagtcggcccccgtggtgcaggccgccatatcccgtacttttgaaatctccggactggacggaaaaaatgaagcctccggactggcggaactgctcaaccggcaggcacccacagaaaaaaacacacccttcattccacaggatctggccctgtacgccgtccatccggaaagccgccgtctggtggaagaaggagtcctccgcgtaccgggcttcaggctctggaagctcccggcgcaccggcaggaaaaaacgggagaggaagaatatctgttcctggggaattctcccatcatttccggagactgcgccagacatgcggagccagatatggaacatccgggaagcctggacatcacctggaacgaagaagcattccgtaaactggagcgggcatcggccggactacgccccggcaaggacaggattgctgtcgttctgcgcggaaccattctgtccacccccttattccagggaatgccttcccgcaccactcttattcccggtctgggggatgacagccggctggatgccctgtgccgagccatcaacaacacccttctgccgctgacggaacagcaaaaacggcatgtgagggaaaacgtggctctttatcccatccatccgcgcagccgggaattggaacagcattttcttccggaacttctgcagggaaaatccatccgcctgaaaagcggattccgttccatcccctatacctgccccgatttcccgaaccccgtccggacctatgtcttcatccgcccggaatccctcattgggccggaggacattcaggaggtggaacgcgaccagggtggaacaatctcctgccaacttctgcccggggcatgggaaaaagcgtttgctttcatgaaggcaaaccctgcgggccaggtggagacggcagttgttttccgggggaacatgcgcctccggtttgaaatcaaaagattctcccttcaactgtgggggatgcctgtgctggattccatccagccaaattcttttatttaccttcctgagccggaagaagagcaacggatgtaccgggagtcctttcacctggcaatctacggcttcctggaacccgtttgcccgtggttctttaaaagctctcccgtgttccgggcatggggttcccggcgtccctttctgatgattgactcatccctgaaaggcccctgattaaaggaatcgtttcgtcgcacgcgccatgctgcgcttgccgccggccggtatttttcacatgggccagatacggcagaaggaacggggcaaaacgtttcagggcaaaataaaacaggacgatggccgcaaacaccagcaacggcgtgaagaaggcgaacaggctggatttcatggcgggaggcaggaaaccgtaaatgggccagtgcagcatgaacgtcagaaagcaggcgggagccagcaaagctattttcgcagacaggccgggcaggtgcttttccatccagatgcctgcgtacatgatcatcatgacacccagaagcatgccaatggccgtctctttccacagggggatcactccggcggaatacagcgctatcagtacaacgggcataaaaatgcttacccagaaaaaaatgccgaattttttattcatcaacagatgaatgtcgtcaatccgccgggaactgagcgcaacgcccagcaggtaaaaagcacaggttccaatggaaatcgtctccgtgtggtccggggccgtgttgaagaaacagaaaaagaggagcaccgcaggaaacagcaggattttgacgcggaccagaagaggcgtcagcaacgtgagaatgataatgtccctcaggaaccaggaagggccgatggggggaacggcatgggagtcatccgcggggaaaaggttcatgcccggaagaaagacgtcccggataccaattaaattctcaaggcggaaggaagcgccgtcatgaggcaggacaaggaacacgtacagtacattccagaacatgaacggaataaacagccagaaagcccggttaaaagccttgttccaggtgatgttcctgcccaggaagtaccctgccagcaccaggaaaaacggaaccctccccaggtaaaagagatggaggctcaccgcctggagaaagggggaggacaggtggacgtacatgatcagaagggctgcaataacccttgatacgtcaatccataagacacgttttgatgggggggggggggggggtaagcgtgtcaagaatcggaggctggttttgggagttatacacttaagcggggaaaaagtaatgcaggcgggcgtcaaagtcaagtatccggaaccttttcgggcatgggctccgcatgggggcatccctgatttttttgctcgaaccggattcggagcttcgctatattggctcccgttatggcaacaccggattttcattatcaggatccttttcccatggaaaaggacgacacccaataccgtctcatcacgtcagactatgtgagcgtgggcgactttgaaggacatcccatgctgaaagtggaaccggagggactgcgcctgctggctgcggaagccttccatgacgtggcttttttcctgcgccccgcccacctgaagcaggtggccgccattctggacgatccggaagccagcgataatgataaaagcgtggccctgacgatgctccgcaacgcggaagtggcgtccgccggcatcctgcccttctgccaggacacgggaaccgccaccatcgtaggcaagaagggccagcaggtctggaccggctgcgacgactgcgaacagctttcccacggcgtttacgacgcctatacccagaacaatctgcgctattcccagacggtggcgctggatatgtacacggagaaaaacaccggcaccaatcttcccgcccagattgacctggaagcggtagagggcatgaagtactccttcctgttcgtcgccaagggcggcggctccgccaacaagacttatctttaccaggaaacgaaggccctgctcaacccggccacgctgaaaaagttcctagtggaaaagatgagcaccctgggcacggcggcctgccccccctaccacatcgcgttcgtcattggcggcacttctgcggaaaaatgcctgaaaaccgtgaagatggcctccacgaagtactacgacaacctgcctactacgggcaacgaatacggccgcgccttccgtgacctggaactggaaaaggaattgcatgaagaagcgtgcaagctgggcctgggcgcccagttcggcggcaagtggtacgccctggacgtgcgcgtcatccggctgccccgccacggcgcctcctgcccggtgggcctgggagtctcctgctccgcggaccgcaacgcgaaagccaagatcacgccggagggcatctttattgaacagctggaaaccaaccccggccagtatattccggaagccctgcgcatgacctccagcaaagctgtctccattgacctgaaccgtccgatgaaggaagttctggcggaactgggcaagtaccccgtcaccacgcgcctgagcctgaacggcaccatcatcgtggcgcgcgacatcgcccacgccaagctgaaggaacgcctggaaaagggcgaagggctgcctcagtacatgaaggatcaccccgtgtactacgccggcccggcgaaaaccccggaaggctacccctccggttccttcggccccacgaccgcaggccgcatggactcctacgtggacctgttccaggaaaacggaggctccatgatcatgattgccaagggcaaccgcagccaacaggtaacggatgcctgccggaagcacggcggcttttacctgggctccatcggcggcccggccgccattctggccaagaacaacatcaaaaaagtggaactgctggaatacccggaactgggcatggaagccatctggaaaattgaagtggaagatttccccgccttcattctggtagatgacaagggcaacgatttcttcgcgaaaatccgcgaaggatgggcctgcgccggttgcgggcattaagcctgacccggaaacaaaatgattcgcggccggagtccttcggggctccggctttttaatgctccggtctcgctccttcctcccggttcggacggcgtgaatatccggtgtgaccaaccataaatgacggtaagggtgaatccttaaatcatcgtaagggtcaggaggtggggaaagagaaagggtcaagtgtcccacatgggacactattttttttcaggttcgcgggtggagaagcgcatgagttccgcctcaaagcggagcggaatgtccccggtggggccgttgcggttcttagcgaggtgcaggttggcctgtccggccaactgctgccgctggtcctcgtcgtcggcgtagtagtcggagcggtaaagcaggccgatcatgtccgcgtcctgctcgatagagccggattcccgcaaatcggacatgcggggaatcccggcttctttcccggcgcgcgtctccggtccgcggttcagctgggccagcacgacgacgggaaccttgagttccttggccagggctttcaggccagaggatatttccgcgacttcgcgttcccggctgttggccgcctgtttggagtgggaacgcatcagttggagatagtccacgccgatgacggccaactgaaattctttctatgggaattcagcgcatgctggaatctcctgttgacttccagcgtcagggccccgaattctacaacttcatcaaagctcagttatcatgattttaacccgctcagaacttgccaaaatggctgaactttttgacgcgcaggaattgcctgacacgttcccggacgacctggaattttccttcctggaagtcctggccccgacaatgaccttgaaggactatctcgccatgccggaacaggagcggcgcaaatggtggattagcagccaaatcatggagccaatccccctgaccgggccggacccggaaacgggggaagatctctttgttaccggattttatttcgagcctgtagcccctaacatccctgaccgcatctattaaccatgaccaaagcaaagcaactcatccttcccatttcctacccggacagcggacgctggtatgctcccgtccggaaaatcaaaatcgacgaacggacgtacgccctaaggatgggggaacctgtccagctgggtaccgtcaaagagattgaaaaagaattccgggtgggccgccgcgtgctggcccgcctggcggacattggcgtcattgagcgggtgcgcccgtctccttttcaatctatgtactactttgcggacattgccgcattccttgagcggacgcggacggccccggcgttctggtcctccgtccgccgggaggcttatctgaacggaccttctccgcaagatgcctccctccggttgtaatctaacattttttatcctggccgcggcgtgaaagccgcggcctgttttgtgccatcatgcgagcatgttttcacgttcccctttcctgtgcggcgactccctttccctgatggagtgcatggacaacgattgttatcacgccgtcgttacggacccgccgtacgcttccggcggcctgacgacggcggaacgcaaggcttcccccgcccggaaatacctgtcttcctcaaggtatctttctttcgacaacgacaccagggaccagagcacccattttttgtggtccgtcatgtggatgcaggaggcaataaggatcacccggcacggcggctggctgatggtcttttccgactggaggcagcttcctttgacctcggacgccttgcaggtggccgggtggacatggcgcgccgtcgtcacctgggacaagacggaggcttgccgcccacaccagggcatgttccgcaaccaatcggagtttatcctcattgccacgcgcggcagcatcggcaaggagcaggaccgcccgcgcgtgtttccggctggcgttttccggcattatctcaagccttccgacaagatgcacctcacaggcaagcctgttccgctcatgcgccacctgatgacggttcttcctcccggttcccgcgtcctcgaccctttcatggggagcgggacgactcttgttgccgcccgcgacctgggacacgtcgctcacggcatcgacctttccccggataatgttcgcattgccgcggacctcctgggcgttcctgttccctgaccgcggccagcccgcggagagttcgccgggcttccgcgagacacgcgcggaccgctggcgggagtgtctcacatgggacaaatgacccttacgatttttcaaaattgacccttacgggcatttatgggcgtaacttctgcctcgccccttccattttctcctgaaacgtacgtattttcaaccgttttcaagcttcttcaagcgaattcaacccttttcaagcatttatggttggtcacaccggagaggaaaacttctggtattcatcatacgcatcttcacgcaaacaggtaataaaccagcatcagcgtcagattgacgccggcagccagcaacaccccgcccggcctcaaataccgcgcctttccaagaaaaaccgccagcaccgcaaagacggcgtacagggagatccacatcaggaaaaatgctgtcaggctctgctcattccccaggccggcctgggccatgttcccgccagggaaaagaaacggcaacgccggaagcacggcgtaaatgacatatacccaatccctagctatcaccctgaaagagaccgccagcggcttcctgccaaacagaatattacgggagcaggcattccgcgtcttttcctccctcagagcgcagggcaaatagaagggaagaagcatcagcgccaggacgggcccggcatacaaaatggcggtcattcccgctacgaaagcaaagaaagcggcaaagaggacaggcacgcccgccatgagcaggaaaagaaaggatgtgctacgctccgccttctcccccattttcaggaaagaccatgaaagataagccatagggtaaaaatatggtttttttgaagtctgccagaaatcgaggccatgcgcaagggaaagccgcccaaaaacatccggagcagcatagccccatccctacgtacgagacaaaatgagaaccagacagactctgattgggattgccccgcacccgcgcccacgttatcctgcctccatggtctaccgaatttgcaaatccatcgaactggaaagcgggcatcttctgtccaaacatcccggtaattgcaaattcccgcatggccatacgcgctccgtggaaatggtgttccgagcggaaacgctggatgccaatgacatggtgttggatttcaaggctatcaagcagatgatgggggatttcctccagcagtttgaccactccctgtgcgtgaatacggaggaccccaacttcgccgccttcgtggccgcatacggggagcgcatcattcccttcgaccgggaagaccccaccagcgaggtgatggctcgcgtcattttcaatgttgcccggcacgcgctggaaaaagccagggagaaccccggcgaatatcctgtgcgggcctgtgttgagctggaacgcgtgcgcgtgtgggaaaccagcagttcctgggcggaatacggggaataactgaaacagcgcgtttcccgccgggcggaacgctccgcaaagattcccggccccgtggaaagcacggccgcaacgccccccccccgcaggttcatcccttaaaagggattcagggaaatcatgcgtttctgcgtccagtgcccgtaggcggaagaatatacatccgtaatttcccgggcccattcgtcaatagtgcgctgatggtgggcgtattttttaaaatccttggtgtccacgcccagcagggagctgtggtcttcctcataatccgcaaattcggaaacgatgcggccggactcatccctcaggcggcccgccatggcaatgtgccctttcttgatgaaccgtttgaccagccctccccccttgatgccgctcagcgccgtgacaaagatgccggccctggcattcgtgggagtgatggaaatgatggcgagttccagcgtataggcccccctggttcccggaggcaccatttcaaaatgcggattttcggcaacctccttttccattctggttgcaacgctcttccggaagtactccgccaggccgcgcagggcatcaaacccctccgcggtatccggccttacatccatgtgctccgtatccaccggaacaacggccatcatgacttttttgccatccacgccgttcaccctgtcattccagatttttttatcatcggcattccagtacgcgtcaaagggaatatgggaatccttattttttacctgatgagtgataaatcctgtttggggaacatgtttgaaattattggaacaagacactaccgccatgcagccgagcagcacgagagccatcagggaagctgagaataaaaaacggtgtttcttcatatcaaataattccatatcaattaattggcagaaccgtttctatcatggcccggcatcctctgtcaataaaacctgcgggtgaacatccggggcggcggtcctcccgccgtgcggaagaggccaaagcgggaattcctagtcttcttcccccatggggcggtatttcacggccagtttttccaggatattcagagccctggaggcgcggctgcggaaggatttgtaatcccgggggtcgcagtcgctccaggcgcgttcggacagggccagggcgcgcggccacaccatatattccaccagacccatattgtacaggtattccgtccagatgttcgcctggaggccgcgcaccctggcggcttcctccggggaaagttccggcaattcatagccgtacacctgcttgagcggaataaggcccccgacggctttcggctccgtggacgcggcggactggtaatagtcaaaatagaagtgggaacacggcgccagaatgacgggatgccctttcctggccgccgccgcggcaaagccgttgccgcgccacgccatgacgaggatgcgtttgtccgcctccagttccccggcttcatcccagacaatggcttcatagccgcccttcctcacgtagtccgcaatccgctgcaggaaatcccggctcagggctttaagatccttctccctcaggctttttaagcggttctggcaataccggcattttttccatgcctcggcagacacctcgtcatggcccaaatgaatgggggagccgggcggaaagacggccttaagttcatccaccacgtctttcacgaagcggagcgtttccggacgccccatgcagacggagtcccgtccttgtttcccctccacgggaaagtccacgccgtcgcaaatcaaatccccgtaggcatgcatggccgcataggaatggccgggaaggtctatttccggaacaacggtgacctggcggctgcgcgcataggcaatgatctccctcatctgctcctgggtgtaaaaaccgccgtaggtagcttccgggtcatgctcccggatggcgagtttcacttcccgccagttccactctccgtcagcgagcggaacgcgccaggcgctcatggaggtaagcagcggatattttttaatttccaggcgccagccggggccgtccgtcaggtgcagatggaggcggttaagcttgaacagggacatggcgtcaaccatgcgtttgacttccgccacggtgaaaaagtggcgggaaacatccagcatcatgccccgccattcaaagcggggaatatcccggagggaaaaaacgggtacggaaaaaccctccccggtccggttggcgttcaacacctgaaccatgctctgccacgcgtagaaaaggccctgggccgccgccgctttcagatgcaggatacccctcccttccctgtcgcgcaccaggcgggcctcatacccttcgcccgtccccgaggggcttccctcaaccgaacaaacggcatccgcagaggctttgtcacgggttatggagaggccggacaaaacgccctgggcgttgagcacattcaggagggcttccaccacgggaacatccttttccggcgcatagaccgccagccgctgcgggagatgagccacggaggaccggtcagacctgcatgcggaaggcgcggggagcagcacctcctcagccggcagcgtttccgccatacccgtgcccggcactccggacagagccagccatgcggccagccggaaacaacgccccttactcatcatgctggaagtacggcctcccctggtctcttctttcaacggaaggagccttccctcaggcccctgtgttccggaaagcaaaggcgcggccgtattcagccgcacctgccagtttccatccttttttacatttaccttcgtccgccaaaaaggccgccgagaccgccacctaatccacccaggcctttcagacctcccaaacctcctcccatgccgggaaagccgggcaccttgccccccttccctttcatggaagccatctgcttcatcatggcgcccattttacccttgccggacatcatcttgcgcatttcggaaaaattcttgattagcttgttcacctccatcaggggacggccgcagcccgcggcaatgcggcggcggcgggacggattcaacaggttgggattgctcctttccttggccgtcatggagagcacaatggcctccatgtgcttcatccgcctggggtccagggcgccttccggaagctgtttcttgattttgccgaagccggggagcaggcccagcagtccttccagcggtcccaggctctgcatcatcttcatctgatccagaaagtcgttgaaatcaaatttgccggacatcatgcggtccatggatttggccgcctgctcttcgtcaatgcgtgcggcggcatgctccaccagcccgacaatgtcgcccatgcccagaatgcgatccgccatgcggccagggacgaaggggccgaactggtccagcttttccccctcaccggaaaatttgatgggcttgcccgtcacggaacgcatggaaagggccgcgcccccgcgggcatcgccgtccagcttggtcaggacgatgcccgtcacgttcacggcacggtcaaaggtctgggccacattcacggcctgctggcccgtggcggcatccgccaccaggagcgtttcccgcggcgcaagaaaggagtgcagatggcgtagctcgtctatcagggcttcatccacttcctggcggcccgccgtgtcaaaaatcatgacggtcccgttctgggtccgggcccattccagagcctcgcgcgccacggccaccacgtccctgctgccgggagcgggcttataaacgggcactcctatttgttccgccagcgtggccagctggtccacggcggcggggcgcaccaggtcgcaggccaccagcagggggcggcgcccctcgttcttcaggcgcagggccagcttcgcgctggtcgtggtcttgccggcgccgttcagccccactaccatgattctggcaggatccgtcaggtccagccccacggcgtccccgcccagcagggcggcgatttcatcacggaaaattttgacgatttgctctccgggcttgatggatttgagcacttcctgccccatggcccgttccttcacgcgaccgatgaattcccgggccacgccaaactccacgtccgcctccagcaaggccagccggatgtcgcgcagggcgtctgcaatatttttctcggaaatcttgcccaggccgcgcagcctccggaacgtgttatccagtttatctgctaaaagtgaaaacataatcgtatgatgcgccagactgtgccacatttcccccttcccgtcaacaagcgcgccctgcatgggacatgatgcttgacttgccgggggcttcgccccatcttttcccgcatggcaccctttgacctgaaagaggaaattttacgcctgaaagaagaacgcaacgccatcattctggcgcacagctaccagaccggggatatccaggacatggccgactatgtgggcgattccctggggctggcctacaaggcgcagaatacggattgcgacgtgatcgccttttgcggcgtccatttcatggcggaaaccgccaaaattcttaatccggacaaaaccgtcattcttccggatgccgatgccggctgttctctggaagcctcctgcgacgccggtgagctggaagccttcttaaaagaaaacgcccataaaaattactatgtagtggcgtatgtgaactgctccatcggcgtcaaggcgctggcggatgtaatcgttacttccggaaatgccgtaaaaatcgtctcccaggctccggaggatcgccccatcctgttcgtcccggaccagaatctgggcgcttgggtaagccgccagcttggccgccccctggaactgtggaacggggcctgccacgtgcacatggagttcacgcgggaccagattcttgccctgaaggaaaagcaccccggcgtgccggtggtggcccatccggaatgcacggaggccgtgcgcctgctggcggaccatatctgctccacggaaaaaatgatcccctattgcacggaaaaccccgccaaatctttcatcattgtgacggaatccggcattctgcaccgtctccgcaagctggtgccgggcaaagaattcattcccgcgcccacggagcaatgctcctgcagcacctgcccgtacatgaaaatgaacacgctggaaaaactgtacctggccctccgggacctttctcccgccgtggaactgccggaagacctgcgcagaagggcggaagccccgttgctgcgcatgctggagcaatcccaatcctgacccctgcctttcctgcatgatacgcctttcagaccacatcgcggccgctggcggctggctctccctggaagctttcatgcagctggccctgcaccacccgcaggaagggtactactcctcttccattgaaaacatcggtcaacgcggggacttttccaccacccccacgctttcccccatcctcgcaaaagctattgtcgctcactggaaagaagcctgctcccgctgcggcaggcggctgcccctgctggaaataggcgccggttccggcgccctggccgtcaaaatcctggagcggctgggattctggaaccgcctgaatacggactacgtgattgtggaatcttccccacgtctgcgcgaattccagcaccttctgctgggaggccgcgctaaaatttactccaccatggaaaaagcgctgaaacactgcggaggcaaggcctttattttctccaacgagctggtggatgccttcccggcgcgcgtatttgaatacacggaacaggactggaaagaagtagggcttgtcgtgaaaaacggagccgtccgggaagaactgcgccccgtccggcagcagccgcttttctcccatatgctggaatacggctcccagccggggcagcgggtggaaattcacgactcctacgcgcgctggtttacgagctggcttcccctctggaacatgggcgtcatgacggtcatcgactacggggatgaaatggagcggctgtactatcgccgcccccggggttccctgcgcgggtacaaaagccaccaggtgctgacgggggaggaactgtaccgtaaccccggcctcacggatttgacctgtgacgtcaattttacggacctgctggaactatcccgcaactgtctggaggaccgggtcactttcatgacccagcgggactacctgctcccccatgcggaaaacacgccgcaggatgcctttctgacggatgaatacggtgccggaggacacttccacgtactcattcaggaacgccagcggctgcaaccggaaggcacccagtaatccaggaaaccgtacttggaaatgccggacgaaacctaagcaggccccgtccgacagcgacggccccatctttcttcgagaaagaaaaacattgattacaggaattagactgatgcccggaagggatggcctcctgtcaagggctcagcatgagaggaaaacattttctaacaaacagacaacattgatgtctattaagggaatgcactgaacgtaagaattataatattatcttttcgtgtaaaataatgaccatcttttataaaaaatcaaaaacatacaaataaaattctatcgacaccgacttcagatcatactattgataaaacgatcaggaaagggcggcccccctcgcttccttcattacccccgactcttgaatacctgatgaatccgcctcatcgttcctcctccgtccatcgttctgccgttcccggctaccggaaatggtactttggagccggcggcagccccggcaggcggggcatggaggcagctccggagcccgacccgctgccatttgaagaaatccacgaacacgctgaaatcactgtgggaccgccgagcacgtcggcggacgggtacagtgcgcacgggacattcaccatcccggaaggagcggagggcaaaaaactctacggcacctgctcgctcttccttggggtggacgactggggaatcctggaagtaaaggactccggcggcaacgtggtggcgcaggtggatctgaaggaaaacccgcagacggcgggcgagcagggcgggcacaaataccacacggggaccggcggggcgcagctcccctccggcacctacagctgggaagtcagccagaccaacatcgactacaatccggcaagcggcaacacctccatctgcaactacagcatcgacgtggtgccgacggaaccggggggcaggaaagaacccgaaccgtgtccctgcgagggagacacgtgcgacaacagcggcggaacgccgccttccccgtcgctggcccggtcgggccctgaggcgggcatggaaagcggcgccctgggaaactacagctcggcggggtgcagcgtgacggcggaaagcacggccacgctgatgtactggtcctgcaacttcggagcgttccgtggacttgggggccttccggccggaagggtggaactgaggggtgaagaaaacgtctccggcctggaaagaccctcctcactggcctacaaccatcccctgaacagccgtctggacgtgccggaagggggcattgtccccggagcacggtttaatctggtgcagggagaccgggtaattgccatgcgctgctacacggacgggtccgtgctgcccatcggggtggacacgtcgggcggagggcgtgcggcgctggccacggtggaaggacaatcctgcctgcgctgggtggtggaagacggcagccaatacctcttctcggcggaaacgggaacgctcctctcctacaccaccacggacaggcaggtcatctccaacgcgtcatcctatctggacgtcaggcatgccggagacggctcgctgaggcaaatctggaacctgtgggacggcctgctcaacgtggaaaacgtcacctccacgggttacaccatcgcgctctatacccctgggcaaatcaccggaacggacggacagggattttataccgttacgggcgctcccttgaaaacatttattctttccctggatgctgaggaaaagttcaccatcacggaacaggcgcctgccaggcagccctatgccgtcacctggtggaacgacggcctggcgtggaacatgcggcagggcacgggggaagacgccctcacgaccctccgcacgcgcacggagctggaaccggaaaactcggtctggcagctggtcacggaaatctccaaaaacggaatcgtggcggcgcgcacctgcgccatctaccagaccacggacgtgggcgacctgctgctcacgctggcggaaggctacggaagcccggaggagcaaaccacgcaatacgcctacgaccagtgcgggcggctcaggacggaaacggccccggacggcagccagactcatgacgcctatgacctctacggccgcctgctctcccgcgacgaaccgtgggcggaaagcggcaggcgcatcacgcgctacacgtatgcgcattcgggggcggacaacttcaacgacgaaccggcctcggaaacggtagacctgcttccgctggaaggacacgtcaaaacgctgacatccaccacctggaaatacacgacggccaaccacatcaaaagaacggaacggcgggtcacgggcctgggtgtggcgggcacgcgcctgacggcggaggaacaatggctggccggagccgccaacatccatgcccgcggacgcacgcggttcagccgggacctcgacggcgtgcaaacgtggcacgactacgcggccacgacggagcacggcgccctctacacggaaacggtggaaacgcgcatcagcggagaagccgtgccgggacaaagcacgcgcgccgtcacctggatcacggcggaagggcagcgcgtcagggaagaaaactacctcctgctttccaccgggcaatgggcgctcacgggcagcgccgtctacgaatttgacacgcagaaccggtgggtgaagcggacggcgggcaacggccggctcacggaacgcgaactgatgtgcgacggaggcctgctgtgggaaatcgatgaaaacggcatcaggacggactactcctacgacacggcgcgccaactggtggaagtcacgcgttccgccgtgatggacggggaaaccgtcatcacgccggaaaccatcaccacctacgcccgggatgcggcagggcgcgtgctctccacgcgtcaagacacgggggcgatgactacccaagaaagcacggagtacgacttgctggggagaatgacttcctctacggacgtcctgggccgggtcactacctacgcctacagccaggacggcttgacggtcacgcaaaccgtcccttccggggctacattcatcacgcgcagcgcgccggacggaacggtgatggaagaatccggcacggggcagcggcacgtcatctacgccatcgacctggtcagcgacggtgtgaggaccttcacgaaagccgtctccggggaaacgcaaaccgagctgcagcgcagcattgtcaacggagccggggaaaccctgcgcacgggcgtccccaacaccgtcggcggagtcatttacacgaggaacacctacaacgccagggggcagctcaccaaaacgcagacggacgcaggcaatgcggccacgacgatggccccgaccctgtgggaatacgacgccttcggcaacagaacaaaagaaacctggaagctggccgatccggccaccgtgtccaactcgcgcatcaccgcgtggagctacggcacggaacagtcggaagacggcgtgtaccaggtcgtcacggcgaccaggaacaacggccggggaacgacctgcgacgaaacgcagaaaacgcttctttcttccctctcgtccacgctggaaagcaaagtcatttccatcgaccccaggggaaacgcttccgaacaatggagcgaatacggcccgggcgccgtccggacgcagaaaagcagcattcccacttccaatgtcatagcaacggccacggtcattgacgggttcaccgcgtcgcagacggaccatgcgggcgtcacggccacgcatacccgcgcctacacggaaaccggcgtcatctactccagcacggacggccggggcaacacggtcacgacgcgcaccgaccttgccgggcgcacgatctcggtgacggacgcggcgggcaacacgacttctaccgcctacggcccctggtttgaccagcctgccgtcgtcaccaacgccctgggcaacacgacctgctacggctacgacctccggggccgcaacacggcgcaatggggaacggggacccagcccctgctcttcggctatgatgaagcggacaggatgataagcctcaccacgttccgggaggacgcgggcgacatcaccgccgaccccacgggacgcacggacggggacgtcactacgtggagctacgatgacgccacgggcctgctcatccgcaaaacctgggcggacggcacccatgaagacaccgcctacaatgccctgaacttcaaatccacgctcacggacgcgcggggggtggtcaccacctggggctacaacctgaaaaagggggtcaacaactccgtctcctacagcgactccacgcccggtatccagtacgcctacaactacctcaaccagctgacccaggtcacggacgcctccggctcgcgcgtcctcacgtacaccccctgcaacgaaccggacaccgacagcatcaccatcggagggagctcttaccagctccaggaacactacgacacttacggacgctcctccggctataccctgaaacagggaaccggtgtcctccaggaagccagccagggctatgaagccgacggaaggctggccagcgccggaatcaggcacgggggaacggagcaacgcttcgcctacggctacctggcgggaagcagcctgctctccagccttgcgatgcccgacggcatcatcagagaacttgcctatgaacagcgccgcaacctggtcacggcaatcaactgccgcctgggggaaaccgtgttcgtctcccggacccagagctgcgatgccctgggacgcccggtcacccgcacccagcagcgtggaacggaacccgcccgcagcgacagcttcagctacaacggcagaaacgaactcaccgccgccaccctgggcgccgacccctacggctacagctacgacaacatcggcaaccgcaagacggcacgggaaccggccggagaactcgcctacgcggccaacgggctcaaccagtacaccggcattgaagaaagcggggaagcgccttttgtgccgacgtacgacgcctcgggcaaccagaccctcatcaagacgtcaacgggcgtgtggaccgtggtctacaacgcggccaaccgcgcggtgagcttcaccagccgggacggcgcgacagtcgtggaatgcggctacgactatcagggacgaaggtacatgaagaaagtcacccaaaatggaacggtcaccagccatgaacgctacctgtaccgaggctatttgcagatagccgccctggacatgctcaacagccggaacgtgctccggacactgttgtgggatcctctggaaccgatggccacccgccccctggccctcgtgcagggcgcttccctgtactgctatggaacggacttcaacaagaatgtgtcggaggtgttcgacgcacagggaacgatcgcagcggcttacgattactccccctatggggccgtgaccggtacgggcagcctcggccagcccgtccagtggtccggcgagatgcacgacgaagaacccaccctggtctattacaattaccgcttttacaaccccaaagacggcaggtggatcaatcgcgaccccattgctgaacaggggggggttaaatttatactgctttttaatcaattatcctccatcaatagattatttgggattattatcattggggcgatttataactaaaagattgataggaaaaataaaaaaatctcttataactgatcttaatggaccctatattccaggatattgggaagaagatgcagagaattctggaataatagcaatttgtttgaagtgtaaaggaacgaataaaccttttaaaattaatttaggtaacaaccctaatcgtattggcaatacaactactttatgtaatggatgggaaaaaattgcaacatttgatggttatgatttatcttgcaagtggaaggaagtcggaggaaggaattccgatgaagcaccccgatatacagggagagttcaaagtaaaacctatgagtgtgtaaaattgtcaggaacaggtagtctgtgtggtactaatttcccagaagattggagagcatagcaatgaaaatcaaaagaaagaaattctatattgtcgcaggaatcgcagtcttatgtgctgctttaatatattggttattgaccatatttttacgagtatacgtaatgaagtcgccagttatggaaccattagttccaacgggatcaatcgttatcatgaaacgcattcacaatatagatgaattaaaacggggagatatagttcattggaattttccttcttacacatccattcctagcaatacaagtacattaggaatagtagttggttttcccaatgaacatctagagttaaaacatggtgatatatggattaatgatcaaatagctcatattagacctttccaatatgtttatacgaaatcagaaccaaatgtgttggaaggatataaaatgaagcagaaatatatgaatatgattattccgaaaaaaacattctacatcctctgtttagacagaaatgccatggacagcagggtagtaggccctattccatggactaatataaagagtaaagtaattgagcatataaatccttaaataattataaatcatctattctatttttcattttaggaattatcattttattcattatatcgtcattattattttaattaataaacaaatttgtggaatcctctgaaaccagtggcaacaaggtcattggttttggttcaagataatgctatctacttttacagccatgacttcatcaagaatgtgacggaagtcttcgacgcacagggaacgatcgcggcggcttacgattactccccctatggaacagccacccgcaccggaagactcgtccagcccgtccagtggtccggcgagatgcacgacgaagaactcgccctggcctattacaattaccgcttttacaaccccaaagacggcaggtggatcaatcgcgatcccattgctgaacagggaggatggaatctttatgcgttcgttagaaataatgcaatagataagagggataggaatggcttgggatttgacttgcctattccccatccagaatttcctacttcaacaagtaatagcggtattgtatggcccaatggtgaatacactccacccggaatacctccttctgcaccgctcaccccagatgatttagcatcagaattttgcagatattccatacctgcaccaaaatgcacatgtcaaaattcatcaaaagtccttgatccttatccagacaaggcaagatccatatgtattgattttttaaagaaataccagttttcaatagcagtcatttcgacagctctttgcctggtaaatgctgaagaacagtgtcaagaaatctcgtgttgttcagaaagaaacaactgtaggttgaaagcccatgtgacttgttatgctagtcgagcctttatcccttttttaggatttccggaaggaggcgctgatattggttggaatatgttacttaatgattctcaatgcgattaatatacaacataatccatatcatgttaatttgcgggttggctccttggcttattggaattggatattccatatgtgtatctaattttcaccatgctctcatgtctggattttcgatgattatattttcatttccggtaacatttatattgactataaccagctggataatttggcgtgttttttgtgataaaataagtaaattcttatcttgtttttcagggatgattatcggacttataataggagccatgttaagctatatcttatgcgatgaacattattattttttgatattgtcaggaatggtagggttaatgataggacatattgaattttatttatttaattatataatggatgaatagtgaaaatatattaatataattatttaaattaagtttgttgtgcgaataaacaaaatattctcttcattatttaaaaataaaaagaagagttcttgttgctgaaggatgtagttattaattacggcagaaacgaaattactgtaaccgcccagtgaacttcaccagcaaagatggaaacacagcaatagaatgcagctacgactacatgggcagaaggcacatgaaaaaagtgccccaaaacggcacggtcgccagccacgaacgctacctgtaccggggctatttgcagatagccgccttgaacatgctggacaaccgtaacgtgctccggacactgttgtgggatcctctggaaccggtggccacccgccccctggccctcgtgcaggacgcttccctttactgctacggcgtggacttcaacaagaatgtgtcggaggtcttcgacgcacagggaacgatcgcggcagcttacgattactccccctatggacaggcggcttccacgggcagcctcgtacaacccgtccacctgtgggatatcaaaagcagcaatgtcgcagaactcatgcacacaacggctggaatcctcattatcatatttttacagttaatcagtctcctagagtagctggttgccggtgtttcgataaacgtactacaactacaatttcgaacaatccctattatcctgaatatacaggtgacctaccaaggaggaattgaaaccatcaagtaacaaaaattatggcaaattatttttcaggagaagaaatcaaagttggagatctcattactacagataacggacatgacaaaaataaagtaatgaaattaatagataacacatatttaatgcaatcttatggtttagattgttttggcgcattattatctagcagcagcgctaaaggaatgatctttgtatcgtttaaagaactttcatctccagatacaaaatttataagaaggaaaacaatttaaataaaattatgaaaacatgaataatcattttaacagatctttcttttctatcaggaagcaatttgtcatttgcagaaaaggagcaaaagaacacacgtcaagaattttcttttggagatgatcattgtgtgactagatttaatttttttgaaaactattcaactgattaatacgaaaaaatatacacattcagtattcaatttctcaagactggatatggttaaatggaatatttgatagcagaaagtataataaccgaaaatataaattatccttctttcccgcatgagtatgaactcatcataaataattgggaaaatgtaaaaaatagtgtgaggaaataaaaaataatgattattataaatcttctgcttttaaaaattgtcatgaatgacatgattgcaatatgcaatggattttttaagatatgggaaaaatagttttagtcaaaaaatataatatattctacggatttttattttctaattgatgcaatagcaagtctttcttattctgtattaagagctatgatgccctgggacacgcgaccatacgcacgcagtggcggggaacggaatccgtccacagcgacagtttcagttacaaggcagaaacaaactcaccggagttaccctgaacaccacccctacagtacagctacgataacatcggcaaccgcaagacaaacgcaggagacagagaaaaaatttataaatgcctattcaattttatacatcttcacgaaattgttatgaattaagatttattgcaacaatatatcgccatccggtatacgacgaaactttcgaaatctaaaaaatcatattatgtcaaaatatataataattcctattattttcacatcaacaatagtttatggagataatcaaaaatttaatgaatatgcaattttttgcgaaaaaatgattgtcacattgcagagctgcacggatgaaaaatccactttttcacactcttccgaatttcctattattttatatactgttttaaatgaaaatcctttgaaagatttttttaaatctcaaaagggagctttatatcatattatgctattggcggagatagaaagattgaaccatcacaaatggttcaatctttcctctatgaaaaatcatgttaatcaaataaaatcaaaaaataccttatgcaacggcatagaggatccaagttctgctgtttccgccaaggaaaaaattattaattacgtaaataatttaaatgataataaatcagatatactctatttaatttcatatttattggatatatacaaaattaatgatttggaattgtttatgaaaatcatgtcgatatcagattgcgaattgctcaaaaaaaatagatatgatagaaaaaaagattggttctttacaaattaatcatctggaacggacgacaatcaaacatttgataaaagaaattcaaaacaaatataaaatacatgaaaatatttataatgaattaagaaaaaaattaaacagtaacatagattgattcgtatcaagaagaatttgtatatgataaaattgcttctccgagagaaatcatgcttgtctccagcagcctgagctatgatggcctggatgccgtcccctcctacggttacagctgcgacaacatcggtaaccgcaagacggcacaggaattggcctaagaactctcctacgcagccaaccgcacggcgagcttcaccagccgagacggagcgaccatcttggaatgcggctacgaccgccaggaacgaaggtacatgaagaaaatcaccgtcaacgggacagtcgccagccatggacgaaactgtaccaggactatttacagatagccgcctcttgactgccggatgccgaacaaataaaatgaataaagagaaccctatatttgttttcccggtttatcataacaaataccatgcttgattttctcgttttcctgctggatatcccgtcccttcttgctgatttttctcctcgcgccaagcataagggagaatcaccgtactggcgtttcatggggctttttttactgactgcagaactggttattctatttttatgggatattacggaaagcccgccagctcttgtagcctgtattactttgggcctctggctgatcgcgcacctctccatccgcgccttcaggaacgggaaaaacgtaaacggcctctccgtccgttccgctccgccattttcctcacaggcgccacaaagaaatgaagcccctaccccgtatctccctgaaagggaatagctatataatttatttattatcaatcattttaaaatatatacccggatttttgtcatacaaatttcttctttttgaacggatgctcctgtccgggactctaacctgcatcagcaacaaaccgggcggcgggaggtagagagaccgccgcccattatggggagttctgagtttcataggtaatatagttggataaaaaacccgcacgggggaaaccctgtgcgggtttattcatcccccctcccggaatgccggaaaacagggccggaacaggccgcagaaaatcatggctgaaccaaattaaggcttgagagttgaaggcatctcgctaatctggcttcagcaagaatcatctgttatcatggtcaccacgaacgaaccgaatatttacgaaacgggagtactggactccaatgcggaaggcaattttgtctataccaccctggacgccgccatcaactggattcgtaaaaattccctttggcccatgccgatgggtctttcctgctgcgccattgagttcatggccgtggcctgttcccggtatgacctttcccgcttcggctcggaagtgacacgtttttccccccgccaggcggacgtgatgattgtagccggcaccgtcacttataaaatggccctggccgtccgccgcatctgggaccagatgccggaacccaagtggtgcatcgccatgggcgcgtgcgcttccaccggcggcatgttccgctcctattccgtactccaaggcgtggacaagattcttcccgtggacgtttacatttccggttgcccgccccgtccggaggctattctggaagccctgctcaccctgcgcaagaagctggatacccagcagcccgcacgcactttcttcaagaaggaagaacctcgcgaagccaacgctcccgtcccggtcaacacggaaatgccccttgaataagttttttcaaacgtttcttccgttcacttttaccattttttctccatgctttctctagaatcacagattaaaaccgccgcagacaacgcccaaaaccgctttgggaaagacatcatcacggaccgctacgaattccgcggagatattacgctgaccgtcgcgcgccaagccgtggcggatgttgtccgctggctgcgggattccgccgggtttgatatgctggttaacctttcttccgtggacaatatgggggaaagcccccgctttgaagtcaactacacgctgacacagtcggaaacgggagcgaacctgagcctcaagacgaaggtggacgatggcgaagaagtgcccagcgtcacagaaattttccagtccgccaactggcacgaacgtgaagcatgggacctgatgggcatcaagttctcaggtcatcctgatttgcgccgcattttgatgtgggaaggttatccttatttccctctgcgaaaggatttccctgttcaaggcgtacctactgaactgccgggcgtcgcctttacggaggcggctcccacccagggagcgccgttcgctacggaacaaggccgctgccccagtgcctgccgcgaaccccggtcccataaattctagcccattttccagccccgcaaggcggggtcccacccatgacccgactcatcctgcccatatgcatcatcagcctgctcagcggctgccaggacgccaacccggcagagcgggaatggaaggagcagttatataaaaacctggcaatcgtgggggccaggaactggattgtcatcgcggaatcctcctttcccgcctacacgggaaccggcatcagaaccatggtttccgacaagacgtcggacgaagtactcctggatgtgctgaatatgctggaagaggaagcccacgtggtgccccgcatcatgatcagctcggagctgcgcagcgttacggaggactatgctcccggcattaagcgctaccgcaacaatatcaataaaatgcttcctgggcgccagcattttgaactgatgagccgtacgatcaattccctgatcgaagacgcggccaggcaattcaacgttctggtcattaaaaccaagacatccctgccttactccaatatttatattgaactggattccgggtactggaattcggaatcggaaacggtactccgcaagtctctggaagccaaggacgccgccaaccgccgcgcggcccaggacagagtgctggacgtgcccctggttccgggagccacgcctgcgccacagggcaacaaggaaaatccgccaatgccgggagctcccgcctcccccgcagacaacctgccggagctcccgcgggaaaaccgccaaccggcttccccctctggagacaaggcccccggcgtgcctccgcctcccatcagggatcctctgggaaggaaaaccgccattgccagattttcatgaaccatcatatggacaaggctacagaagaacgcctccgcgcagaggcatgggtaggggacgccattttggcgttgtacgtcagggaatggattctggcggaggaaggagcgatcaacggcaagcttttcgtagaattcaccagcaatgattttctgcgccgcaccggcaacgccacaggcgtggaagcggagataggccgcactttcaaagcgggcggcctggaagcagcctatgcatggattgagcatcatttgaagccccgcatggaggaacgctggcacaccctgcgcagaaaagccctccggtaaactgccgccgccatgcccgccaccggaacacccctgccttgggaccgtggcaacggcccctgcgtgatggccccgccccatttgaggggctgggcggaagaggccgccgcctttctttccctccggggcatggacggaatcacagccttcgccacctccggctcttccggttctccgcccaaagccattttgtttacccgccgcgccctggacatatgcgcgcgcggggcattggaacatttacatgcggaaagcggggactggtgctgcccgctgcctgtatggcatgtggggggcgccatgatttacctgcgcgcggccctggccggaaccgccgtccatacgctccgcggaaagtggtgcccgcaggcttatgccgacctgatgaaaagttccggagccagatggtcctccctggtccccacgcaggtagtggatctggtcagcctcggcctccgcgcgccttccaccgccggatgcattatcgtaggcggcggcgcgctggacacggagacgggacggaaagcacgcacccttggctggcccgtagtgcagagctacggcatgacggaagctggctcccaattagccacggcccttcccggagattccttccatacggaccgcctttcccttctgccccattgggaagctcagacggacaaaggcggcctcctgcgcttccaggggaaaggcaaattgttcggccgcctgctgacgcaggctcatggagggttccttctggaaagagtcgctccgcaggagtggtggagcacccgcgacctggtgcgcctggaagggcgtttgctgacctttctgcgccgggcggacagacttgtcaaagtcctgggggaactggtggatccggatgccgttcaggacgttttgcgccgcagcgtcccggaggctgtcgtggaggcggttccacatccacgtgccggaatggaactggtcgcctgcggcccttccgctgcccccctggagcaggcctgccgcgagtggaatgcgtcggccccaggcccccagcgcatccgcgccgtcatggaaacgcccatccccctcacggtcatgggaaagctggacagaaaccggctgcgctcccagttgagcgatcatccggaaaagttgaagggaatttactaaaaggtaatcttccggggatattcatcaaaagaatccggacctgatggaatgaagaaatacggcggggttggaatccccaatcccttgcccacttcattcatcccgtctcccaggaagccattttcctccgccttgcgggcttccgcacgcgtcttcggaaccacccggtcccactccatttttttctttaaaaaaagaacgtgacatgaccaataattaaacattcagacacgtgaaaaacgcttgtagggcagaggtttttcctgctagaaaagagttgacccatgcgagcccgtcttttgcttattccctttattttttccgttccggcttatggccaggacattccgtccgccgcagcggcaaatcctcccgggcaggtgaaatacgctccggtccgggacctctcccaactgcctatggacggcggctggacgtacggggaagtgctggacaaagccgcggctggagacttccgtgccaatatgctggccggggaatactggatggggctttattacctgaaccgtggagacctgccgctggcctgcctggaacatatgcagcattttttccgtgatgcggccacggcatccggccatccggcacccaagctcatgatgacggatccttacgggattttcgggattttcaaggcgcaacccatgcaaccggaacatgcggaatggctggctgcctgccgcaagcttgcggaaaagggagacatggatgccgttacggccctgtacaccgtcacggatcttccggaagccgagttgagacgctacctggcccccctggaaaagaaggccgcttccggcgaccaggatgcgctggcccagctcgctttcatcaaagtggattggctggaggaaaatcccgccaacgttatcgagaccctgaagcaataccggaaaaacgccaaaccggttcttctggcgcggataggggaactggcccttgccctggacggcaaggacggcaggggatggagggatacggccattcaatccctttcccgggctgcggaaaaggggcacgcgggggccatgcggcttctggcggaattgacgaagggggccgcaccggcacaggccggaaagcttttggcggaactgcgctccagaggggatctggaaactctgctggcggacctctccgccggcatgaaggaaaaaacagggggagggaaaagctccctcctccagcctttgttcgagcaggccaggaaactgggcagcaataacgcctgtgcctggtacgcccagttaatttccgaagcgcagcccccgcaggaacaggagctgcgcaagacggcccttgatctgctgtcccttcatgacgaacggggcatgccatacctgaaggaacctctttccttcccccagaaaaaactcaaccagcttcccccctacgccaagacgcataaggagcttgagctggcctctcagcttggggacgcagattccagcgtacagttgggcgagctgtggaaggaggaactggccaatacactggattccgtagggaaggcccatgaagcgcgggaaaatatgcgcgtatggtacaggcaggcggcggaggaaggccaccccctggccaggctgcgcctggcccaaatggaaaacccggacttaatggacaaaccgtccgcagaacctgccagaacgctgctgaacgattgcctggcaaaagccgccgcaggagatttcatcacgctgaaaggaatttccgaatacgtcacgccggaacaatgggaacagctgaccgccaccctccgtaaaaaagctcagggggggaacgcccgcagccaggcggatctggcatacctgatgttattcagttacaggagcgaagaatccggctacccggaagccctggcctgggcccggctttccgccggacagggagattcctgcggcatgtatgtgctcggccgcgccctcatttatgaattcggcctggaaaaacgcatggccgagggggattcctggatgttccggggagccttgaaaggacatgtggacgcggcggacatgtggagttccaacaatgagaacctgcagccttacagcgccatgatgcacggtctggcggcacgggggcatatcccctccctgcttttcctggccaaccaggcggcctatccccagaatacgggggaaacagcggccctggacaatggatcaacttccgcctgccagcatgtcaagctgaccctgaacggaggggacgccaacactccgccgtggctccggaaaccggaacagaagggtaagggggaagatactccggcggatgccggaaccgttcctccctggatgaccccgtccggcagggaacgccaggccccggccccgaaaaccatcaatccggaagccgtgaagttctgggaacaggctgtggaactcggcagcctgacggcactggacgagctggccaattattatgaaaccgtggcagggaatgtgcaggagcctgcggaacggcagcagcttctggcctctgccatgacggcagccaccgccctggtgaaaaaggaggacgtacgcggtttcaagaggctggcccgctattacgggcagggcatcggcgtgcagccgaacagggaactgcacaaggattatgtactgaaagccgcggaaaccagggatccggaggctctggtggagaaggcgcgcctgctcatcaagggcgaggatctggagccggacccgaaattggcgctggatattctgaccgatctggaagagaaccagacgcatgcggtgcccggcatgcatttcctgctcggctacttgcatgaagaaggcctcggcaccccgcaggatatggccctggcctatcagttttacatcaagggggcggaacaggacgacgccaagtgcatgaacaacctgggttccatgtatgaacgcggcaccggcgtagccaaagacctggccgaagcccaaaagtggtatgaacgggcggcggagctggggaatgaagacgcccttgccaatgtggaacgggtaagggaaaaactcaacacgaagaagaaataggctcctttcccgttccggaaatgccacggaatggcggcagaacacaaatttttggcgcaggtttctgcagacggcagaaaataatgtgtgcgaagcggacgcgattttttaaagcggccttgcctgtttcaagggaagtaaatgattttgaaattcgcgcattcttacacaactagccagccggccggtgcggcacggatacgcgaaacttctaatccggggccatgccgctccgggccgggaggcattctcaaaaaaacgtcatcagcaaataagcggctcttttgaaaaataccttaattatcaatgctgttgaccatttcatccgtccctgtccatcaaaccggaaaaactgcgtggaatgaaagtaaaaaaggaggggataattcatcccctcctcacataaaaccggctttgacacagtctgcccggttataatcatttgtatgcccgtcatcagtttctgcggcggcgcagaagaagagcgcccaggccaagaagtcccagagaggccgtagccggttccggcactgctcccccggaaataagaatattgctgatctcacaccccatgccgccggcattggccacacgggtattattgaatattaagccaaaagaagaataattcgcatcggggtccaactgcaggtcgaaagagacatcaacaggctcattctgggtaagagaagctttggcattttgcaaagaccatgttcctatgaccgtggatgttccctcggccgtgaatccatacacattgcaggtataatcgcagttgaaatttgcggctccccaagcagaggtgtaagtaatcgtaaaagacatcttggctgactccactcctgaaggcatgtcaaatttgagaccggcaaaatttcccttgccgacatcggctactccgccgagttgaagaccaagggaaccatcgtttaacgacacctggcccgacaaagcgcttttcgttatagttccatgccagacatcggtttcataaccaaagatatcctggggtgttattccgtcaagggatacggtgttctgagccccgcccccggttggagaaagatccagagaaaacgaggcagcatttgatagagaagacaatgccaaggcggctaaaagacaaagtgtttttctcatgacaaaaaaatccgtaccggatttagaatccgcatttcgaatgcaaagaatgaaacatttttggtacaaagaatgattcagtcattggcatttcatctcattatgtatgtaatgcattaataatttaatctaaaaattattttcatggggagaagcgccgtttttcttcccttctgtgtttccataatgggcgaaggggacaattcgttttttttccgttcgggactggaggaaaaaacatggtaacagattcagttatctacatttttgattcttttatgttgacaccggattctaaattcgcctaagaaaggagagtattttatatacaaaaaggcgcaggcattttggatgcctgcgccttttcctctcccacaaggaggaaaaccgcatcaataattcaggatgccttccgcgaccttgcgttcgaagtcagcaacatctaccacctgcccgctcagccgggcgtgttccgtggcaaaggccatcacatgggaatgggcggattcctcaatggaagtggtcatatcttccggagagggcaccgtcagcatgtcatcatacagagcctcaatcaatccccagtcgccgccgccgtgcccctggtagcctccggccagttcctccagctccaccacgcgggtttttccaccaaagtggggcgtcacggttatttcaccggggccgttttccttgtagaagactccggctcggattttgcctttggtgccatacacttcaatgtggcgcccctgttcgaaagccgtcatcgtgaacgtgcccgtcaagcctccctcaaagcgcatgatagaaacctgatggtccggctggtcgttgtcgcactggaggtagtccctgccccacggggaggttttcagccattcgcagatttcctctgcggtagcttcctgcgcccggtcatataccatgcccagccagcgtttgcattcgtcgtccgtggcgtatttgcgggcgtcccaggggtcttcccccaccggggtggtccagtccgtgcagcgttccggccggggtgaggagagcgtctttttcgtaaagaaggtaagctccccgaagctggcgacggaaaggcatttacgccggcccatgagccagtagaggatatccatgtcatggcagcatttggcaacgatcatgggagtggaggttttgctgttgccccagtgtccgcgcacgaaggagtgggcaaagtgccacgcccccacgccttcattggcattgaaggtgatgacttccccgatttccccgctgtcgatgatttttttcagggtccggtaaaactgggtgtagcgcagcacgtggcacacggccacgcggcgcttcagcaggcgcgccgtatccctcagctccagcgcttctttcagcgtcttggcgatgggcttttccagcaggacatgatagcccagctccatggccttcctgcacggagcgtaatggtagtcgtcctgcgtgccgatgatggccacgtccgccaggcgcggttccgccagcagggaagcggcatccttgaacaggcggacggaatcccgttcctcctccggggcaaagtcgcgaacggcttccgtgcgctgtttgacgggatccgccgcggcggcaatgcggtagcggtttttttgttccatggccagcttcatgtaggtgcgcgtacgggaaccgcacccgatgccggcgagggagagtctcttttgttcaggcataaggattgtgcagataatatgggtagagaggttaaagaacgccggatttgacaagcaacgcttccgcgtccggatcacggcccatgaagtcgcggtagagttcagcagcaggcttgctgttgcccttgctgaggatgcagcggcggaagtcgcgcccggtccggggattcagcactccttctttcaggaagcggctgaaagcgtccgcttccagcacctccgcccatttgtaggagtaataaccggaagcataacccgtgggatccgcgaagatgtgggtcaggcggcgcgccacggaagggccgcggtccgtcatcggcacccggtaatccgccagaatgcgttcatccgtttcttccagcggaacacccttgtactgaggccagtttacgtgaagctccagatccagcttgccaaagcagagctggcgcatgaaatccgtgccgctcatataattgcgggcggcgcgcattttggagaacagttcgtccggtattttttcacccgtttcatagtgggcggcgaagaggtccacggattcacgctcccaacaccagttttcattaatctgggagggcagttccacaaagtcccaggcaacgttggtgcccgacagggacttcacttccacatcggaaaggagctggtgcagcaggtggccgaattcatggaagatggtttccacctcccggtgggacagcagcgcgggcttgtcccctacgggcttggtcatgttgccgaccatgagacccagatggggaacgcggggttttccgccgtgcggaggttcccctacgctcaggtagttcatccacgctccggcgcgcttggagtccctcggatgccagtccgcataaaaggaacccaggtgttccccgctttccgcatcatgcaattcatagaacaggacgtccggatgccacacctccaccgcgccttccggcgcttccccggattcaccgggcttgaacgccaccgtgggacgcggcgtgaccgtgatgccgtacaggccggagtagatggaaaagagcccttccatgactttttccacggagtaatacgggcgcaggtcttcctcgtcaaaagcgtacaattcgcggcggcgtttttcagaccagtatccggtttcccacggggagagcttttccacgggttttcctgttttttcctccttgtacctgcgaacggcttccatgtccttcaggaaagagggcttcaccctgtcatgcaggtcgttgatgaatttcagggcgttggctccgctcccggccatgcggcgggaagtggcgtaatccgcaaagcagccgtaccccagcaaatgggctttcctgtccctcagttccaggatttcagcgataagggcttcattatcgtattctccgcccttcccgatggaacaggagccctcccacatgcggcggcgcaggctgtccgagtccgcaaactgcatgacaggctggagggaggtgaatttctgggtgaagcgccagcggggggcttcttccgtgccgtggccgttggccagggcatccaggcgggcggcttccttcgcggaatccggcagcccggaaagttccgcttcatcttccacaatgagttcccaggcgttggtggagtccagcacgttttccgcgaatttcttggtcttcagggagagctgggcttctatctccgcatattccggcttcacgtcgtccggcaggtccgccccgctctcgcggaagtccgccagcgtttcctggatgaaacgctgcctgacgggggaaaggcttttcacccagtcacaggaggccgcggctttcagcaccgtccacaggcgcgggttcaacggcacggaggaggagaaagccaccacttccggcaacatttcccctatggcctccctctgggcgggttcgtcattgacggagtccaggtgcatgatacggccccagcccaggtgcagatcctcggaggccttttccagagcgccgaaggtgctttcataagtcagggactccagcggctggtcgcaaatggtccggatattctctttggcgcgggagatggcttccgtgatgtccggcctgatggcctccggcgtaagccgggaccaggaaaccagaaaggaggggtccagatagggatggttcatattgcttgatgtatgatgttattgaaaatgaaaacggacgcgttccggtatttgccgcaacagccatgaaaaaataaaacttaccatgtttaaggaacatccggcggaacagccgcaacctgctgagcatcttgatgaatgctgcggcggatccggcctccggggcatgcggaccgaacatcttcatagcggcggagaaggaacccgcaaccttccgggcacggcttcacgccccttttttatcaccgcaggcttatttttcaagatgaacaagcttcctgtcccgggattggacgtcatgttccatcgtgatgagggggaatgccatctccaatccatccatgaggaaaccgggcatcaaaaccgctcccccacgtttattcctaattattttccggaagaacgggccttgtccagggtctccagcactccggcatggttcgggaagcgtttcagcgcctgttcgcacatatccgcgcattcccggaattttccggccttcaggtaggcgcgggccagcacccattccgcagggtatggcactacgggaggcaggagcagggaggaaaaacgctggctccgtatggcctcggacatccagacattggcggaatccgggaacatgagggagcggatttcagaagaatacaggctgcccgtctggagacagcgcgcccagtaggagacgctcatctgcctccgggcggcgtccgcgccgtccatcagcagccgcagaatgccggacatcttgtcaaaggcggacgccacggcgtccgttctgccctgccttgcggcgtagcatgcgcccatgtattgggaggccactgcggtcatgccgttgctcaaatccggaaaccctttggggagaggacccggaaaagccttgagcacaagggcctgccggggaaggccgggccgggccagcatcaggcgcgcaggcagcgtcctggcctcccacagctgaaggagggttccgggagccaacggatgctttttgtccaggggaacggaagcggctctggaggcgatggcttccgcccttttgtaacggccggcgcagaattcggaaacggcacggtaaaggatggaacggaagtaggcgtcatcaagcgcgggagacacgttttccgccttctcccaggccaggcacagattttcagactccttgaacgcggcggatgccccttcataatctcccgtgcggaacaggcaatggcccagtaaatgatgggcggatgcggaaaaggggttggcggacacggccctgcgggcggtttccaccgttgccggataaatggatggcgccacctcttccagcagggcgcgcatgaacagggcggcctgggagccggggcgttccttcaggacgtcttccaccacgcggacggcctccttctgcccttctccggggttgccctgcccgtcaaagccgtcccggaggagcatggcgtaaaagaggggggcgtatgggtcgcgcttccaggtggaacagatggttttccacgcttcccgcgccttcacggggccatccatcagcagcacggccagggcatccgcataagcgcgttcccgttccgggcagtccgggcgcagcgccagctctttcatgtgcttcatggaatggacgcgctggttctggaaggcgggccccgcgcccatcaggctcatgcacctgccccagtgggccatgaggcagtccgggtccagacggagagcggcgtcaaatttaaggaaagccctcatgtccccgaacgtgagcagatgcgtcattccctccagcaccagcatttgcgcggcgggagatgaggaacccaccatcatcggctccacgccgggcggcagcacggcaggctgcgccggaacgccggcgcggaagacggcttcccgccagccgttcagggacgggctgttcatccagtacccgtgtgccccgtccgcagcggcggaagaacatcccgccacggcggcggtcagcaggacatggaggaaagaggcggccatacggaagaaacggttacatcctgtccgggagctggatgcccagcaggcccagcccgtgcttcagcgtgcgggcggtcagctcgcacagggccaggcgggagtgccgcaccgtcccttccgacttcaggaccgggcacgcctcatagaaggaatggaaagccctggccaggtcaaacaggtaggcggccagcacgttcggacggcagtcgtccaacacctgcggcaccacttccccgtagcgggccagaagccgggcaagatggatttccgcgtcttccgaaagctgaatgggggcggaccagtccaaaggcccgccgtccagcttgcggaagatggagcggacgcgcacgtaggagttctggaggtacggggccgtatctccctgaagggccagcatcttgtcccagttaaaaacgtaatccgtcatgcggttctgggaaagctccgcgaattttacggcgcctatgcccaccacttccgccacgcgcttcttttcctcctccggcatgtccgggctcttctcctccaccacgcgggccgcgcgttcaatggcttcatccagcacatcctgcagggaaaccgtatctccggagcgcgtcttaaacggcctgcggtcatcccccagaatggagccgaacgcgatgtgccggtagtccccgtccatgccgcggcggcgctgcgtggagaaaatctgcctgaaatgcagggcctgcggggcgcccactacgtaccagatggaatccgcgccccacgtcctgatgcggtggtccagcgtcgcgaggtccgtggtggcgtacaggaagcctccgtccgctttccggatgatgcaggggttggcgcgccattcccccttttcctgcacgaggaaggggtcttcattgggaggcacggaaccgtcggaaaacacgcagatggcgccgtcgctctcccgggccattccggcggcgatcatgccgtccaccagcggggccagggcatcattgtaaaagctttcccccagccagtaatcaaaatggatgtcaagctggtcgtaaatcttggaaaggccggattttgaaacttccacgcagcgtttccagatggccaggttttccccgtccccggcctggagcttcaccagttccgccttgcaggtatccagcagttccggcttttccttgcacatcaggttcacatccttgtacacccgcagcagctcgtcaatggggttggcggccagcgcctgttcatccagaatattcttccagccccacagaatcatgccgaactgggttccccagtcaccaatgtggttgtccgtaatcacacggtgccccacgaagcgggccacgcgggaaagggcgtcaccaatgatggtggagcggatgtggcccacatgcatcggcttggcgacgttgggagcggaaaagtcaatgacaatggttttggggtcctgcactttttccacccccagccggtcatccgccagcatggccagcaggcgcgctgcgtaaaattccggcctgatgcggaaattgatgaatccgggcccggcaatctccagggagcacacggcatcctgccctatccggtccgccacctgctgggcgagcgcgcggggattcgtgcggcaccgcttggcaagcaccatggcggcgttgctctggtaatccccgaaccgcaaatcggcggagggcgtcaccgaggcgtgaaaatcagcgggaagctcctcccccaacaccgcttttaacgcggaggacaacttttcttcaagaattccgggtatggtcatgtctgcccagatgaacggacattccaccgccgtagtcaaggcgcaactgtcatcaagacataccttttccggtaaaaacaacaggacggagatgacatccccgtcccagccggcgaaccggacgcccggcgcccgaatccgcccttcgcttcagcgggcgcgttccctaaaaggagcgcattctggaagtcttcagccacgcttccagtttcctggaggccctggcctccctttcccgtttcttttccggcacggactttccggagaaagccttcgccagaaccgatgccagttttcttttcattttcatcttattgatattacaggttttgttcctccgtatgcggggctttggggaatcttcccgtgccccctccggggaacacctcctacatactgtaccaggtaagtttagtccataagaaaaccaggcattccttgtcatacttgatacaataagatataagacgttaatcaggagaatctcaccaaacgatacgctgcccgggttccaaacagatccgcgccccataattttccgctcaggcgccggacaggcattaccggaagagggtctcctgcttcattcccccctgaaatcatatttctccgccttccacaggaacatgcgccggtacaggtggtattccgtcacgcaaaggacgggcatgccgatgatgccgatgaacggcagcaggcgaaacaaatgacggcacagaaaaagaaccaccatcaggaagctttcccggtacacggtcatgtacagggaatacgggttgatgagcgttctcctgtacagggaggaagccagcagcggccccaaaatgggaaccacccccagcacgaccacggcagcgaaggtccaccccctgcggcggccaatatacgcatcataccggtccacggactgctcaccctggagcaccgccttgccgcaggcggggcaacgctggtcaagagagggctcacggagaggctgcccgcagtaaaaacaccgccggtaactgcggagaacttcctcatgccttttccatccggagggaggaaccacggtgcgcagcctggaatatcctatccagttcagggcacggggggacggattgggcgtgccgcactccgggcagtgcagcccgcacgggtacatcatggagccgcatttggaacagaaaatacggtgggaatattcccggcggcggcaaaaaatgaagaaagccccaagccccagaccccccagcagggccaggatgacgactacccccgggtacaggagggaataggctaccaggtattccgaccaggaatggtccgactggtgcatgagggattccggaccgatgggattttgcgccacgtccggaagctggcttacgtatttttcacccatgtccctcagaggccccgcgggaagccattgttgtatgggaatgggttctttcatgactggacatgcagggttcgccataaaaacagcatttcccggaaggctgtcagaaaaacggcggcattcagcataggatgtctccgccggaataggtaggggaaaataggccatgccggaaaattccgccggaaatggggaagaggcccttttcatccggcgcttttccgtgtaatatttcttccatgccgactctccgccaagccgccaaggacgacatcacgctgatccatgaactggcctgccaggcttttccggccacataccgggacctcctttccagagagcagatagatttcatgatggactggatgtattcccccgccaacctggaaaaacagatggaggaggggcacgtgtacttcatcgcctcccatgagggaaaggactgcggctacctgtccgtccagccggaaggccccggcgtcttccatttgcagaaaatctacgttctgcccggcttccagggcctgcatataggaagctttctgttccgccacgccatcagctacatcagaagcatccacccggaaccgtgcctgatgcgcctgaatgtgaaccgttataacacccgggcggtggaattctatcagcgcatgggcatgcgggaactggaacgcggggatttccacattggacacgggtattatatgacagactacatcatgggactggatattgcctgaaacgcctttccctcagaaaaaacagtcaagcctttcccggccaggaacacctcgggcagccctgctccgcagagcgggcagtccccccgttgaaacctccgggaacctctattgaaaatctcccttccttcttgacactcaatgtagtattcttcatcatccattccatgaacgtctttcctgcctttattgtttccggtgtcatcgccgccatgacggttcccgccttatccctggcggcggaacaggccaatggctccaaagtcacctatccagccttcaacgattccagccatatccacgggccgaaactcaaaacttccgacctgaaagggaaagtggtattttttgaatactggggcatcaactgcccgccctgcatcgccagcatgccgcatctgcaggaattgcaggaaaaattccagtccaagggctttactgtcataggcagccacagccagctcccgtcccccagggtcaaacagtttctggaagaaaagaagatcactttccccatctatcagagtctgagcattccggaggctccctgcccgggcggattgcctcatgccgttctgattggagccaacggaaaaatcgtggccaagggctatcctccccagctctatgacctggtgaaaaaggaagtgatgaagatggaacgcggccttcctattctggaaggagtggaactgaacaaatacaaatcgctggccaaaacggtcgtttccaccggcagcaacatcgaatccaaaatcacacctctgaggaaaaaaacgaatgacgaggaagcgcagaccatatgtgaagcttttgacgcatggttggaaaataccaaggaaatcgtgcaggcccggatccagtccgaccctctggaagcggtaacggccatcatgcgcctcaaaacggcggttccctccgtcaaggaatttgacgaacctctggcggccctgaaagcgaacagggatttatcaaaactggccgaccttaataaaaaaatctccgctctggaacagcgcaaggcaaaagggcgcaaaatatcggaatccgaccttaaatccctgacgcaggccgtggacaaattcacggagtccgacaacgaagccacgcaaaccgccgcctccagcctgaagaagaacctctcctctctggccgcttcggaaactcccgggaaataaccttcccctccagcagccatttcctgccggcaggcgtctaagggcgcctgcttcttttttcaccggacgcctttttctttttcccctccagaacagacggaacagccagaatggagcatgtctccctgacaagggaggaaagggtccggtcatcgtccagatccgtcaccaggaaatgcggcctggcgccgggataggggcagccctgctcctgttgcggaaacatcttcaaacccgactccgttatcttgacatacaactggttgtcacacaccaaaccgaagaatgtccggccgcagtacaatccgtagtccccaaacatttttctgaaggaaatatccccggcatgccggagctggaaacaaatatattctactacatccggggaagaggccatgacggactctctcatgcctcccccgtccgctgcaagaagcaaatgacggccgggaaggcttccggcaggaatgaggcatccccgttattgacgggaaaaggcgcagcatgccccacggagtcatgacgaacggcatccatgccgccgcagccgctccgcaagaaaatccttcccggcgtctgcccggcaagacatgaacggcagcagcgattccgtccgcacagagccattcttatgattgccctgacggagctttttattcatgatgcccatgaaccttccatgaccgccgcgtccgacatcctctggaaaccagcctgcctctcccgccaggaagcccccacccttacggaaggggccggaacctgccggccgggaaacggtgaccggaacacctccgcgaaccgtccggaaaaccatgaaaccatgggagaaaaagaccctgcggagaaccggaaagcgccccggccgcgaagcgggcgcgtcatcctgctcaacggagcctccagcgcgggaaaaagcacactggcccggaacttgcagcttctgctgaaagaggcagctatgattttctccatggacgattatctggccatgagccggggaaaacatgaaaccgccctggatgccgtcagggaatccggcctgcccttcattgaatctttccacgccgccattgccgaggcggcccggaaaggcgccctggtcatcgtggaccacgtcatcggagaatcccgccgctggattcaggacctcttgaaccgcctggacggcatcccccgcatcctggtcagggtggaatgccgccaggatgttctgctggagcgcgagcggcgccgcactgaccggactcctgctccggcccatgcccagcgccagcacgcaggcatccaccgccatttcccgcatgatttctccatagacacttccgcagatactccccggaaatgcgccatgcggctcatcagcctcctgccgggagaattcctgccctgatgccgtgggaacaggcggaagcctcccgtttgaaaaaacaggctgttcccgcaaacatgttggaaagacatgaataggactttacagagccgtctccttcacggtagcctgtgcccgcgcttgttgcacggagagatggcagagcggtttaatgcagcggtcttgaaaaccgccgtggggcaacccaccgtgggttcgaatcccactctctccgccaaacttcttttatgccgggcgcaagccatgcctgttttcacggaacagaaaaaggcaggcgaatacgacggccgccccggcattcccggaacggccctgagtgccttattgatccttcctcctgcctaagactccccattcagttcccggcggatgtattccgcagtgggggattttttcccggctatctgctccggcgtgccttccgccacgatggttcctccggcatcgccgggtccggggcccatgtcgatgacgtagtccgcctccgccatgatttccgtgttatgttcaatgacaacgacggtgttcccctggtccgccagacggtgcagcacgtcaatgagcagccgcacatcccgcggatgcaggccgatggagggttcttcaatcaggtacaggtctccgggcagttccctgcctttcatcagggcgttccggctgacgcgccggcccttgatgagttccgtcaccagcttgagccgctgggcttccccgccggaaagcgtgttggaggcctgccccagcgtcagataacccaggccggtttccgacagcagtttgagggggtccgaaatgcggggctggctttcaaaaaattccgccgcttccgcaaagtccatctggagcacgtccgcaatggtcttccccttgtacctcacggtcagggtggcggcgttgtagcgcttgccccggcaggtctcgcacggcacatagcaggggggcaggaagtccatttccagcttttgcatgcccgtgcccttgcaggattcacagttgccctgccccgtattgaaggagaaacggccgcggtcaaagcccagcctgcgggcatccgccgtctgcgcgaacagggtccggatgtcgtccaggaaacccacgtaggtggccggggtggaacggggcgttttgccgatggggttctggtccacgccgtacaccatgcggatggagtcaaagccggaagaggttttccataattttctctgctccctcgtgagcttgtcgccgatggcctggcgcgcagccagacggatggttcccgtcatcagggaagttttccccgctccggatacgccggtgagcaccgtcagcctccccttgggaatggcaacgttcacccccttcaggttgtgcaggcagcagccctccacgcgcagccacgcggattcatccttttgggacggaatcctgcgccttttcccgcggtagggatgcctgggcttatggtgcagggccgcgcccgtgacggagtccggcatggcggccagttcctcaaaggtgccctgggccatgattctgccgccatgaatgccggctcccggccccatgtccacaatatggtccgcgcgcctcatggtatcttcatcatgttccaccaccagcagggtgttgccccggcgtttgagttcatccaacgtgcccagcagcaattcgttgtcccgcggatgcaggccgatggtcggttcatccagcacgtacagcacaccgcggaggtgggaacccagctgggaagccagacggatgcgctgggtctccccgccggagagcgtcgtggcactccggtccagggaaaggtagcccagccccacccgctggaggaagttgaggcgctgcgtgatttccgccactacgtcacgggcaatgagcgcttcctcccgttcaaattgccaccctttgaccagttctgcggcggccacggcaggcagggaggcaatgtcaccgggagtcactccctgaagccgcacggcgcgagcaaattcattcaaccgcacgccccggcaggcagggcaggttgttattcccttgtcatcgtccgcctgccgcgccagttccctgtcatatttcagttcagcctccagcagggattgcgcctggtcttcctttactttccccctgccgacgattccatgcccgcggcatacggggcaccacccgcgcggagagttgaaggaaaacgtgtacggttccagttccgggaaagattgcccgcaggaggcgcatgccagcctggtgcccatcagttccggacggacggaaccgggcgggagcacctgcaggaacccttcccccatctccagcgcggcatgaaccgccccagcaagcttttccggcggccaggaggcctccggccgtgcaacgaccaggtccaggtcatggctggaatagcggtccagcggctgaaatccgctcagggaaaccagtttgccgtccacccacatttcctcatatccctttccttccgcccagcgggccaggtcggcgtaatgccccttgcgtcccctgacgaggggggccagcaacgcgagtccgccatgttttttcagctccctcgccaccagctccaccacttccgattccgaccttttgcccaccggaacaccgcactgcgggcagtaggcctgccccagcttggcatacagcagacgcatgaattgccagatttccgtgacggttcccacggtggatttggtgcccccgcgggacatgttctgttcaatagccaccgtggggggcaatccggtcaggcggtcaatgtccggactttccagctgttccgtgaattgccgggcgtacggggacatgacgtccatgaaacgccgctgtccttccgcgaaaaagatatcaaaagccagggagctcttcccggagccggaaagcccggtcagcacggtcatttctccgcgcggcacgtccaggtccacgtttttcaggttgtggtggcgcgctccccgcagggccatcacgccttccggtatatccatgtctgcggattccgggacggcggcgtccgcagggtcgtaaacggaagggttgccttccagcacctccctgagatatttgcccgtgtatcccttcccggcggctacgatttcctccggcgtgcccgtggccaccacatggccgcctccggcgccgccctccggccccaggtcaatcacgtagtccgcggatttgatgaactccgggttgtgttcgatgaccagcagggtatgcccctgctccaccagttcccggaacacggccagcagaacttcaatgtctgcaaagtgaagacccgttcccggctcgtccagaatcagcatcttggagctgttcgcgccggaacctatctggtccagcaggattttagccagcttcaggcgctggttttccccgccggaaagggtattcagaggctgccccagggtcaggtgccccagccctacgcgctgaagcacgcccaatttggaagcgatgcgggaagctttggcccctttttccgcgctgaagcattccagcgcagccgctaccgtcatgccgagcacgtccgcaatattcctgccgtcacggtacacgctcagcacttcgctcccgtaccgggaaccgtggcacagcggacactgaacgaaaatgtcggaaagaaactgcatttccactttctcactccccatgcccatgcagcgcggacaccggccgtccccactgttgaaagagaaaaaaccgggcttcaagccgcgcgcgcgggccgtctccgtttctgcgaagagggagcgtatttcttcaaaaactccggcataaacggcaggggtggagcgcggggtgcggacgatggggctctggtccaccatcaccacctcatccagatgttcccagcccttgatggacttgacgcgggcgggttcctcctcgcatacggctcctttctccaccagagcgttcaggtaaagaacatcgtgggccaaggtgcttttcccggacccgctgacgcctgtcaaacaagtgaagacgcccaggggcactttcacgtccagtttgcgcaggttatggcgcgtggctccggatacggtcagaaactggcgcggcttgcgcctcttttttggcaccgcgatgcgtcgcctgccggaaagaaaagcccccgtcagggattcttcaatttctccaatccgggcaggcatcccggaataaaccagccttcccccttcccgtccggaaccgggtcccatatccaccaggcagtccgcggcacgcatgaccgcttcctcatgctccaccaccaccagggtgttcccgcgctttttaagccggttcatggcggaaatcaaacgggacgtatcgcggggatggagcccaacggtaggttcatccagcacaaacagcgtatccgtcagggaagcgcccaggcaggtcgtcaggctcacgcgttcaatttcccctccggacagggaccgcgtggagcggtcggacgtcaggtagcccaatcccacttcattcagatattccaggcggctcctgagttccgccacggcatgtttcaagccggggtcttcatccgcccgcggcgtcacgtacctatccacccaggccagcagttcatccatgggcatacaggaaagttccggcatgcttttgccgcccaccttgaattgaagggcttccggcctcaggcgcaaaccgtggcaggaggggcattcctgatatgtgcggaaacggctcaggtacacccgcacgtgcatcttatgcgtgcggctttccagatatttgaaaaatcccgcaatgccgtaccacagcccctgttcatacatttcatccgggtcatcgccgtcgccgtacagcagccagtcccgctcccattgcttcaaatccttccacggcacatccagacggactttacgggcgtttttgcgccagccgcgcatcaggtcccgcttgcattcggaaaatacttttccgtccccctcaaaaatatggatggccccgtcctgaacgctgagttccggcttgatgcaccggttgtagtcaatcgtgatgactcgcccgtagccgcggcattccgggcacgcccccagcggggaattaaaagaaaacaggcccggccgcggttccatcagcggatgccagtctccgcggaatttcaaagcggacagcaagacgccgtccacacggggaatcacatgggccacgccgccgcccaggcgcatggccgtctccagagcctccagcctgcgttccctctggtcttccgacagcctcacgcggtcctgaaccaccagcagcggttctccttcctccagcgtccaatcctcatcctccagccggaggatctctccatgcgcaaaagcgcgcaaatacccctgtgccaccagattccttttcaacgagggaagatccacggattcgggccgcgccacctccaggcaaaccatcacttccgttccggcagggaattccgcatgcagcttttcatcaatggtacctggcgtttccggcttgatttcccgccctgtttccgggtcaatgcccacggccagacgggcgaaaacaaacttccagtaatcattcagccccgtcatggtccccaccgtggagcgggatgtcctgacggagttgcgctgatgcagggcgatggccggaagaatattctctacggcgtccacatccggcttgtccatgcggtccatgaactggcgcacgtacggggaaaaggtttccatataacgccgctggccttccgcatacagcgtgtgcatggccagacttgttttccccgatccggaaggacccgtcaccaccgtcagccgccccaggggaatgtccacatccacattctgcaaattatgctcacgggcgccgcggatgcggatgcgcccatcctcacaatgactcatggagaaagaatatcatcaatttggaatcattccaagagaagcgcctgtcatgaatccgggtttccagaggagtccggccaggtccaacctgcctattacgtcatcatcagcacaaatggagggccgtgcttgcatttcttccggcagccgctagtatttttcgattcttagaccgctgaaagcgactctacctcgtcaattttcaacaagacaaagatgattaagtggattctaaccaagattgtcggcaccaaaaaccagcgtgaagtgcgccgtctgcgccccattgtggaacaaatcgtctccattgaagaatcatggaacggcaagggacaggaattcctgcttgagaaaacgagggaatggcaagggtacctccatcgcttcctccccatggatctgccccccgtgcgcattgtggaagccgcgcccagggaagagctggaggaaatagccgccaaactgaacgcccgttttgaatccctgaaaagcgaattcgcttccctccccgcggtggaagccactcccgcctccattgaagaagggaaagccgcctggaacaacattacgccccagtttgacaagctgcgggaacgctacctgaaccagatactgccggaggccttcgccgccgtcaaacacggcgcccgcctgctctgcggggaagaacgcgatatctgcggtcaaaaacaggtttgggacatggtccactttgacgtgcaactgctgggcggcattgccctgcaccgcggctacattgcagaaatggccacgggggaagggaaaacgcttgtcgccaccctccccgtttacctgaatgccctgaccggcatgggtgtgcatgtggtgaccgtgaacgattatctggcgcgccgcgactcggaatggatgggcatgctcttccagttcctggggctgactgtcggctgcatccagagcatgatgccctcccagctccgccgggagcaatacgcctgcgacatcacttacggcaccaacgccgaattcggcttcgactacctgcgcgacaatggcatggcaacctccaagtccgaacaggtgcagcgcgggcactacttctccattgtggacgaagtggactccatccttattgacgaagcccgcacccccctcatcatttccggccctgcggtcgtcacccgggaacagcagtacgataccctgcgccccgccattgaacgcgtggtgaaggcccagacggacctttgcaacgaactgatggcccaggccctgaaagcccaggaggaaggccgcacggaagaagtgggccgctgcctgttcaaagtaaaaatgggccagccccgccaccgcgccttcctgcgcgccatgcaggatcccgagctgcgccgcatcgtggaaaaatatgaactgaccctttaccaggatacccgcaagaaggaactctacaagctgaaggaggaaatgttcttcaccgtggatgaaaaaacccacgacgccgacctgatggaaaaaggccgggaagtcatctcccccggccatccggaagatttcgtgctgccggatctgggaaccgccttcgcggaaatggacgaagatcctcgcctgacggaaaaagacaaactgcgccgcaaaaatgaactgaccaaacagcttgacgaaacgggagcgcgcctgcacaccacctcccagctgctgaaggcctactgcatttacgaaaaagacgtggaatacgtcgtcaaggaaggcaaggtcatcatcatcgaccagaatacgggccgcgaaatgccggggcgccgctggagcgacggtctgcaccaggcggtggaagccaaggaaggcgtggaagtggagcgagaaaaccagacgtacgcgaccattaccatccagaactacttccgcctgtacaaaaaactggcgggcatgaccggcacggcggaaacggaagccgcggaattccatgatatttacaagctggacgttcttcccatcccgaccaaccgcccctgcatccgcaaggatcagaatgacctcatcttcaaatcccgccgtgaaaaattcaatgcggtggtcaacaaaatccaggaacttcatgacaaaggccagcccatcctgattggtacggccagcgtggacgcctccgaaacgctctcccgcatgctcaagagggccaaaatcccccatgaagtgctgaacgccaaaaaccaccagcgagaagcggaaatcgtggcgcaggccggcaagcgcggagccgtcaccgtctccaccaacatggcggggcgcggcacggacatcaagctgggcgaaggcgtagccgacctcggcggcctcttcgtcctgggtacggaacgccatgaatcccgccgcattgaccgccagctgcgcggccgctgctcccgccagggggaccccggcgcctcacagttcttcatctcctttgaagacgacctgatgcgcaacttcggcgcggcggaacgcatgaccaagatgatggaacgcctgggcgtagccgacggtgaagcgctggaacacagtttcctgaacaaatccgtggaatccgcccagaaacgggtggaacagcgcaactacatgtggcgcaagcacgtgctggactatgacgacgtaatgaacaagcagcgcgaaatcgtttacggataccggaatgaagtgctttccacggaaaacccacgcgaaatgatttacgatattctggaagaagtaatcgccacgcgcgcccatgaattcctggacccggatgcggaaggcgtcacccacccggacgaattgctcgcctggatgaacgcctccttcccgctggggctcacggcggaggccgccaagctggaagaacggcccatagacgacaccattgccttcctcattgacaaggtcaaggccacttatgaagacaaggcttcccgcgaacgcccggaatacctagaccacatggaacgccagatcatcctgggggccattgacaaaatgtggcaggaacacctgtacaacatggactccctgcgggaaggcgtgcgcctccgcgcccaggggcagaaagaccccttggtggaatacaaatcggaagcttacgatctcttcatcaccctgatggaaagcatcaagagcgaagccatcagcaacctcttcaagagcaccaccaacctggacgcctttgaggacttcctggccagcctgccccagtttgaatcttccgacgaaaaccaggaaggcggaaccagcctgccggaaatcggctttgacggcatgccttcggacctgctctccgccctgagggaacaagtctcccgggcacgtgaacaacaatccgcccggcaggcggaaccggaacaggccccggccgtcatttccgacgccacc

SEQ ID NO: 17 - DNA, 2644468 bp, Akkermansia muciniphila (residues 1,322,235-2,644,468 of 2,644,468)
  source 1..2644468: mol_type = genomic DNA
accatcggagaaggttacaaaccagccgtggcggaacccaaactggtcatgcccaagcgcaaggtcagcgtcgtgctccgcaaggaagaagccccccaggcaccggcggaaacgccggtccccggagaaggggaagaaattgccgtcactctggactcccaggactttgcggaaaccatggacaaccgggattccgcggatacccgtacattctaaaaaagccgcgcatcacttacaggccgggggaaacgggaatgtccgttttccccggccccaaacttccggtccgccttggctacgctccctcccaacaaatccgccaatgtccgttccgtgctggagtatgttccgtacttcagggataaaatctttgccgtgcatgtggaacgccccctggtggattccggggaattggtggacgccctgctggacctggatgtactgcaggaaataggcgtcaggcccgttctgattgtggaaggggcggacgcctccgcgctgtacgaacacacgcgcgtctgtgaaatgcgctccgccctggtggaagcgccattgaagggcggccagcttgtccgggaaagagtccgggaaattctggggcgtcaccaaattcccgtggtggcttccggccgttccggctcctttgacccggaatccgtccatatggctttcagcctgggagcctccaaatacatcgccctgctcaatgaccacaaggttccgtccctggacggacgccccattgccgccattctggaatcggaagtagcggaactggcaggaaacgtaacccaccgcgaactgcttgaccaggcggcggaagcctgccgggcgggaatcccccgcgtacacctgctggacgggaaaatgcgcggcgtgctggtggaggaacttttctccgaagaaggcgtaggcaccatggttcacacggactcctaccgggaaatacgcccgctgaaagaagaagatattccggagcttctctccatgatcgcccgttccgtggtggactccaaattagtcaaccggaattacgaagacattgccgccagaatggacagttactacgtgctgaccctggacgacagcatcgtgggctgcgttgccgtttatccctacccggagcaccacagcgcggaactgggctgcctgtacatcaagcaccgccatgaaggacgcggctatggccgcgcactatgtgaatttgccaaaagaaaagcggaagaaatgggaatggaattcatcttcgccctctcccaaagcgccgtccattacttccgggaccgcatgcattacgcggaattttcccgcgacagcctgcctccggaacgtctgcgcaccctggaactcagcggccgcaaatccggggttttcgggttaaggctgaaatagttttctattgaccaatcttgccccgttcctgcttatgggcggaattcactggtccaaacgggcgggcaactgttcccggctgcggcttctccggacctttttggtttaactgctctgatgatacgccgcagcatctaaaacccattcccccctgtctcctccgccgcatggccaaaaacaatgatttttttattttcccgcatccgcccggcgccggagctttaacttcatgcggtgtcctaaacggcaaaatcttgagaaaagaaagcgcagcttctcacaagaggaactccaatccaacattcatatccccgcgtgggatatgcgctcagggatgacaacccgccacggttttccagggcgggaagcgctggggcgcggcttccaatcgtcaaccaagctgtgcatcattgtgcatgcttttttgaccatatgataccctttttcactgttttccagcatggaatataaactatgctctaaaagtaacaagccccttaaaccgttggatttaaggggctttaaagatggtagcagggaggtgatttgaacacccgaccaaaggcttatgagtcctctgctctaccactgagctaccctgccgttaagtggttgatgccgtaaggcggggagatatttagcccggattggaaagaatgtccagatttttttatggttcaggagcattttatcatgacaatccgcctttccctccggggaaatcattactgatgaatcatttttccactcaaccgtctcatatggcccgcgtcccggaccatttcctgcataccgacatttacaacgcagggtatgattattcctccagccccatgccattgacagagcgggacaggaaatagagacccataaagattttcggatccaccacttttccctgctccatctgctccatcagccagtcatgcaccagagtaagaggaatgcggtgcacagtaatattttcgtgggccacaccgcctccttccgatattcgatgcaggccttccgccagatagaaagataccatttccgtagtcaatcccggagaggaaggccccgcaagaagatacgtccaggaatccgcccggtacccggtttcctcttccagttcacgccgggcggactgcagcgagctttcctccccttcatccccggaaatacccgcaggcagccctacggtccgggcatgcaggggaacacggtattcttccaccagaagcagttctccttcttccgtcacggccacgatcataacagctccgctggcattcacccggcgcacgtattcccaccttccctctttcaggagttccagaaatttcccccggcagagagacaggcatgcttcctctggctgttccatttgttccatgatgcagcccacgttaggtttccggccgtctgttgtcaaccatgcggaacgcctcccttctgcatcttcccgtgcagttccaatccggttcctgtaagtggttgatttccggcggcgtaatcatgtccttttcgtcacccaagcctgtaacaaaaccataatatattgacaataaataatttataaaattacacagaaaatatactcaggaggactaaattatcggaggaagcaagaacaaaatattttttcatgtggaacccccgtggaacgtagggccgaggaacgatgactcgcgctgtttcaaaaagatattttttccttaggcgcaaatcagtaatttggcgctcccgtcaaccggggtgtcgagctgaaagcggatgagttcgccttctccaccccgatggacgccacgagctgtcacggctgcggatgaacctgatccggttccatccgcgggcggcctcgtagcgggacggaacgccttacggctatttctaaccagcaacatcttttatttccaataacaatgacgccgccatcagaactgtcagccacctggtccagaatcacgggagccttgcaaacaatcatgtccccggaggtttatggattgtggtttcccaagttttccctgctggaggattcagggaaggcgctgacgctggtgtgcgacgatcctatggccgccctctgggtggaaaacagctatacgccggagctgaagcaggccgccatgctggctctgggcacggaacgccagataaagttcatctgcacggatgaagtggcttccatgcccgctgcagaaggccagccgcaaaaggcttcctcccgggccaaaacgtcgcagacggcggattccccggccgcaccggcaaaaaaacagcgcacaccggccgccagggcatgcctgaatgacttatatacgttcgattcgtttgtggtttatgaagacagccgctttgcttatcaggcagggctgtccgccgcacagtcggaacgggccctgttcaatccgcttttcctgtacggaaaatccggcgttggcaaaacccatctgctccaggccatcggccatgaggtgcttcatcaggattcatccaccaatgtggtgtacgtcacgggcgaacagttcgccaatgaatttattgacgcttcccggacccagaacggacaaagcttcaccaaactgcgccgcaagtaccgcaaggctgacgtcctgctggtggacgacgtgcagtttatttccggcaaggaaaaaacggtggaggaatttctgcatacgtttgacgaactgttccatgcccacaaaaccatcgtgatttgcgcagacgccgccgcatgcgatatttccaatctggatccccggctggcggcacgcctggaatccggacttacggtagaattgaaccttccggacgacaacgcacggctggaaatcctgcgcagcaagcgcgaccgggctggcatgaacgtatccgacgaaattctggagtttctggccagccgcatccagaagagcgtgcgccgtctggaaggcgcactgctccgtgtagccacctttacttccctgtccggagacatgcctgacatcgccaaaattgagcagcttctacgcgacatcctgcgggaagaaacaagccgcatcctgactgtggattccatccagaagcgcgtggcggatttttacgaactcaaggtcagcgatctgaccggcaagcgccgccccaacagcatcgcctttccgcgccagatcgccatgtacttgagccgccgcctgacggaacgctccctgaaagatatcggccaggcattcggcggccgggaccacggcaccgtcatccatgcgaataagctggtcgcctcccgtatggaagaagatgtacgcgtgagggacatcgtccagaggctggaagaagagttgagggattgatttccttatcttcattccctcccggccagacaggaaaagcatcggtcccgttagcccccatggcttttcaggcggaagaagcgcttccgcggcgcaggggagaataagcttgaggcgaaagcggtttggattagaatcaccctgttcccattgattccatgatccacgccgaccagctttccaaagagtttggccgctttcaagcggtaaagaatgcctccttccagattgaaaagggggaaatcgtagggttcctggggccgaacggcgcaggcaagaccacgactttgcgcatgctgaccggctatctgccccccacttccggcacagccacgattgcggggtttgacattgtgaaaaatcccctggaggctcgcaaacatctgggctacctgccggaacacgtgcccctttacgacgaccagcgcgtcacggaatacctgaaattccgcgccaggcttaaaggcatctcttccaagcagatctggcctgccgtctccaaggttgtagaacaatgcggcctggatcccgtgcgccgcaagatgatccgcaccctttccaaaggctaccgccagcgcgtaggcctggcggacgccctgctgggggaaccggacctgctgatccttgacgaacctaccaacggtctcgaccccaaccagatacgccagatacgagagctaatcaaaggtctggcggccaaccacaccattattctttccacccacattctcagtgaggtggaaatgatttgcaacaaggtcatcatcattgaccagggaactatcaaggcggcggataccccctccaacctgacggccaatctccgggccgccggcaagattacgctggaattccggggagacctggccctgattacgcagaaactggaaaatctggaacatgtgaagaaggtcatccatgaaggaacggacgccgacggctggcatacgctgaccgtacgcgcggaggccgggacggatacccgtgaaaaggccgcgcgcctccttgcggaacagggatgccccctgcgccatatttaccgccacacccccacgctggaagaagtgttcgtggaaatgacccgtaaagattaacccccattttccatccccgcccatccaccacctcccatttcccttttctccccatgtctccagtacttaccattttcagaaaagaactcagaagctacgtaatgactccgtacggatgggttatcctggctttcgtcatggcccttcagagcgtctccctgtccggcacgctgaaggcttttcaactggccccgcagaaggaaggcatcctgttcttcatcctgcattctcccatgttctggttttacttcctgttcatcttccctctgctcaccatgcgttccctggcggaggaggaaaagacgggaacgctggaatccctgcttaccacgcccatcaagacatggcaggtggtcctgggaaaatacttctccgcgtacgctttttacatcatcttgtggctgcccatgctgctataccccctcctggcggactggtccaacctgattgtacagtggatttacgggtatgatgcgggcatggttcttccctaccgccttgcggactgggccggggcatacgctattctgctgctgatcggcgcctggttcacggccattggcattttcgcctcttccatgacgggcagccagattatttccggcatcatcaccatcggcctgctggttctgattttcttcatggggctgattcccgtggtgtggggggaatttcccgcagcggggattttccactacatgtcctgctcggaacatctggaccgcttttccgccgggctggttgacacgcgccccgtcatattttacctgaccatgacggttctgacgctggccgtcaccatccgcatcattgaccaccgccgctggaaacactgattcattctgccttcacccttttttatttttatctatctatgagcgaaacaccagacacccccgccgcggccgcggaagcctcccagcccgcctcccgcaaggtcaaacgcccctggatgacctggatcaagcttttcctgctgttccttatcgtcgtatgcctgaattacgtgggctgccacgagtattaccgccgggacctgacggaagaccagcgctatgaaatatcccgtcagagcatcaacatgctccagtccccggaaatccagaagcgcaaaacccccgtcaaaatcacgttcgctttcctgcgcaccacgcagaactacacccgtatgcgttctcttcttgaggaatacgaacgttattccaacggcaaggtgaaagtggagtacgtggatcccctccgccagccgaacaaggcccgtgaaatctccaatatctacggaattgaattcaagaagaacctggtcatcattgatgcccgggaagatacggaaaaagcactcaagacgtttgaaggcacccaggcggacgccgcccacgtgcgcatcctgcccggagacgccttcgtagtgtacgcccccgggccggacggcaaaagcatgaaggcggtggcgctccagattgaagacatgatgactgccggcatttacggagcggccaacggcgaacctcgtaaaatctatatcgcggcggacaagagcaacttcaacgaaaccctgagcaacaaccaggaggaaagcattttcacgacgctgggcaaaatctgccgttccgtcaacctgcagcttgtgcccatccgcatgagcggtctggaagagattccggaagatgccgcaggattcatgattatcggttccaggtatgatctgtccccgcaggaggcggaagtgctccagcggtactgggcgcgaccgaacgccgccattctgatcatgctggaaccccagaatgacacccccaaacagctttaccgctttctccgcgaacaggggctgcggccccagaatgaccgcgtgatgctccgcaacaggagcaaccgttccgtttttgaaattaactccattttcgccccctccctgaattgcacccgtgaattctggaattccagcaccggactggaaggggagagcatctccctcattctggattccgacaacgcggccatggaacagaagcgcattacgccgtatccccttctggtgactacggaggattattacggagaaaccaaatacaaccagttcccagccaagttcgacgcaagggaagacaatccggggcctctgatgatcggcgcggcccttatccgggggaatgccggagacgtgaaccagaacaagactaccggacgcctggttctgcttggcaatacggacctgcttcagccccggcaaatcaaaccggagcagagggatttcatgcgcacgctgatcggctggatgacggaccgtgaagaattgcgcggcctcggttctcgccatgacctgaccgtcaagctgaatctggaccgcaacgccctgggcgttttggaactcctgacgaatatcggccttcccctgctggcgctgctgatcgccctgattatctggaacactcgccgtcattaaccccatccacgcccattaccggaagcacatgcgcacattccgctttatccttctcatcctcatcaccctcgcttctgtcggcgcggcggtgctcctcaccattgacggcaacctgtcccgcatcatcgggcgcaccgccttcagttccggagaacggcttttcccatacacccgggaagaaatgaacgaggtttcctggatgcgcatcaattgcgtgggggatgtcgcggaattccgccgtaagcccaacggcgtctggtggtgcgaaaaaccctggaacgaccgtatggaccctcgcgcggcggcggccattctccagtacacgtattccaccagcattgtggacgcgctgcctctgcacaaaattgattccgcttccctgaaggaattcggcgtaaagaccacccccgttaccatcactctcaaggaaatgagcgacgacggaaagcgttcctccaccgtagcgcgctatacgctgggttccgcggcgccctggctggtggacgatccggagaacaagaccacggatgacaccacctatatgcagacggatttctacggacgggacacccgcattctggtgggcaccggcaacatccttcctctgttcaaatccggtatccgccagcttcgggaccatcgtcccctgctcctgcatccggccatgcccgcctccattgaaatcaacaaccggggccagcgcatcgccctgaaacgcgagactcccggctctccctggaaaatcacgtatcccctttctctggatacggacccggccatgatggatgtgctgctgggcacgctccaaaagctgaccgccgttcgcgtgtacaacccggaggaaacaagcgtaccggacatgacggatgatcagatcacctccgtttccatcaggaatttcacaggccgtctttcagaagacggcaaatccctgcaaatggaggaacagcccgtcacgctccggatttatcctccctcggacaacggaagcctgtccgaactggtcaaagccaccgtttccgaccgtaaggccgtctttgaattggcgcaaacgacggaaaccaacaaggaagttcccggcgtacgcaatattccgctggatctgggccttctgcgttccaagcaattgacggacatcggggattacaagattaccggcctttccatccgtaaaagttttcaggattaccctaccatcgcccgcttcattcagggggatgagaaaaaaggcatcaagcccacctggctgtacacggcagagggcgcccgttaccaggaagctaatccggagcatctcatttctctgctgaaaaccgttaaacagggaaaagtggccggcttcgcttcggacaaagttacggacctttccgtgtacgggctggataatcccagaatgacgctcaccatgtcccttctgcccaagcccggtgaagagccacgcccccccgtgacggtgtttttctccaagggtgcggacggttcctggtatgcccgccaggccggaaaacccaccgtcgccatactggacaacgcctacatgaaggatttgctgacggatgcactggcctggaaaaaaaagaggcttttttccttcagcaggtttgacctcagagaaatgcaactggaacgcatcggttccggaggccccctggttctgaaattcgaccgtctggacgattcttggacagcctccaaagacgggaaggatgaaaccttgaatatcaacccgaaccgagccaaccgctatctggatgaactggaaaaaatggaggtgagcgcctggctcccctatacggacgccacagcgcatgaagccctgaaaaatcccgttttccgcctgaaactcatcctccagtcttacaaggaggcggcccccgtgcaggcccaatccggttccagcgacattacctttgccccggaaccggaaacggaggacaaagtcatcacgctggaaatcgccccggcgggagaggccggatacagcagattttattacggcagagtaaatacaaccccgaattattttattctgaacatggacgccgtacgtctgctcggcgccagcctttcggaagacaactaaccactcctcccgcatgagcaagattgagctgcacaccgccatctcctttctggacggaatcctctccgtgaattccattccggacgccccccgcgccctgaacggccttcaactggaaaacgggggcaccgtttccaaggtggccgccgccgtggacggctcagaaaaggccattcatgcggccttggaaacaggtgcagacctgctccttcttcaccacggcattttctggcagcccatgcagcccattaccggcatcgcctaccggaagctgaaagccgccatggacgggaacctggcgatttacgccgcccaccttcctctggacgtccaccccgcatacggcaacaatgccctgctggcgaaggcctgcggcctccagccatgttcccatgatgggctggactaccacggcgtttccctcggtacgcacggagaatttccaggtacatgcgcggaattggagcaaaaactggaaatcgtcctcggtgcgcccgtgcaggccttctggaaagattccccggaggctccggccggagatgtcttcatctgtaccggaggcgcgggagacgatcttgcccaggcagcggccctcggctgccgcacctacgtgaccggggaaggctcccactggaacatccccctggcccaggaactgggcgtcaatctggtcttcggcggccactactttacggagacgttcggcgtaaaggccctggggcttcttctcaaggatgtttacgggctggattatacctttattgacctgcctccctccgcctacagccattgaccaaacgccacggaacatgaatctgactacggacgacgccgacgggaaaatccgcctggatcaataccttgccgcccaccttccggagctttcccgctccaggatccagagcctgatcaaaagcggggatgtgttggtcaacggctctcccgccaagcctaaaaaccccgtctcccgcggtgattccatcaccgtccgcattccggaaccggaaccggcggaagcccagcctcaggatatccccctggacatccagtatgaagatgaagacgtggtagtcatcaacaaggaaagcggcatggtcgtgcatcccgcggccggcaacccggacggcaccatcgtaaacgccctgctccaccactgcggggacctctccggcatcggcggagtggaacgcccgggcatcgtccaccgcctggacaaggacacctccggctgcctagtcatcgcaaaaaatgacggcgcccaccagtccctgacggcgcagttcgcggcccgaagcacggaaaagcgttatctggccgtcgtccagggtattccttcccaaagttccggcacggtcttcacccatatcggccgccatcccgtcaatcgcctgaaaatggcagtagtcaatcccggttccgggaaagccgccattacggactacgatttgctctgcgcagacccgtccacggactcctccctggttctgtgcacgctgcacacgggcagaacccaccagatacgcgtgcacatgctccatctgggccatccgctcatcggggatcccatttacgccaaacccgcccggcaaaaggcaaaacccggcagactcatgctccacgcgtggcggctgggcttcgaccacccgcgcacgggaaagcgcatggatttcgaagcgcccgtcccgccggaatacacgccgtggctccagctcttccccaacgggctttacggggccatcccggagccgcgcccggtacaggaagacgggggacggaactaaacctccccgccatttcccggcagcggaagccgcttcaacggacagaatacgggaaagcgccatattcaaatcccagagctggcccggccttcgtcagcaatccgccatcatccggcgacaccatccttgcggacaaagatgcggcaacagacccgccgttcaccttcttacgccccctttccggcaggagcgtccacggtcacagtcagccgggaacaatattcttttcatcaatcaaggagaaatgaacctgcccggcatcttccgggcatgcaagaagaatccgcggcggagacctcccctttaatcttgatttgcccccccggaaccgctaccctgacacggctttaaccacacagctttcacagagacatggagaccacgcaccacggggaggacgcctctccggacaatccccccaggcagcaaaaaagcggaaatacggatgaacagaccatcgccctgacaaaagcgcgtctggccattgacgaggtggacgcccgaattgtagagctgttaaaaaaacgcgccgaatgggtgcatgaagtcggccgcattaaaaaggaaaaaaattcccccatcttcgttcccgaacgggaaacggccctgctcaacaaattgaaccgcctgaatgcgggcgtgctgccggaagcctccctccaggctatttaccgtgaaatcatttcctgctccttctttctggaaggcggcctgaccattgcctacctgggccccaaaggaacctggagccaccaggcggccctcaagcagttcggaaaaagctgcgaactcattccgtgccagagcttcaaggacgtgtttgacatggtggaccgggggaaggcccagtacggcgtagttcccgtggaaaactcttcggaaggctccgtcaccgccgtgatggatcttttcgtcacctctcccctcaaaatctgcgctcaaatcaatctgaacatccgcaacagcctgatggcggatattccgcgggaacacatccgcatcctgtattcccacccccaggttctcggccagacgcggaactggatccagcggcatttcccaaacgcggaactcgtggaaacgtcctccaccacgaaagccagcattcttgccaaggagaacgccgccatgggcgcggcatccctcggctgtccgctggccgcggaattgttcggcctgaacatcctggaagaagacgtgcaggaccagtcctgcaacaccacccgttttgccgtcatcggacgccaggaaacgcagcccagcggcagggaccgcacctccctgctcatccgcatccagcataaacccggcaccctggcggaagtagtcaactgcttccagcggcacaacaataacctgatacgcattgaatcccgcccgtccaaagtcatcaactgggaatacgtcttttacatagatgccgccggccacattcaggaatcccccttacgggaaacccttccggagctggagcagcactgctccatgctgaagattctgggcagctacgcggatacggacgtcatttaagcaggttcagccttcccccccagccttcccccccagcctcacaccattctgaacaaccatgaacatagccacgattgccgccctggccgtcactctgggacttcccgccccggcccagcagtccgccactaaaatcattacggaaaacggacagcctgcgctggccctggacgaacagttcgcagcccggctgcgcgacggcggaatgaagcagggttccccggccaccgttcccgcggaattttcggcagcagcgcccggccgccccctccctgcggatgccaaccatgccgctgtcagggaaacggcgggggaacgcaaccggcgcatggaatggtggagggatgccaaattcggcatgttcatccattacggcctgtattccggattggccggggaatggaaaggcaggcccggaggttccgaatggattcaaaaaaacgtggaagtggatacagatacctacgccgcggaagctctgcccctgttcaagcccagggaaggcctgacggaagaatgggcccagctcgcccgggatgcgggctgccaatatgtagtgctcaccagcaagcaccatgaaggcttcggcctgttcgacagcgccttgacggattacgacgccaaaagcgccgtgaaccgggatatcatccgcgaatatgtggactcctgccgcaagcgcggcctgaaagtgggcctctaccactccgtcattgactggcatcacccgtcctatgacaacaccatctgcccggacctctgctaccctgcgggacaggcggcaatgcttaacaggaaaaacattccccgcgaccacgccgcttaccagaaatacctgcacgcccaggtccgggagctgatgacccgttacgcgcccatcgacatcatgtggtgggattactcccagggagccatggagggggccaaaggctggaaggcgccggaactgatggacatggtgcgctccatcaatcccggcgtcatcatgaacaaccgcctgtacgcttattccggcctgaacaaaaaccaggccggcacgctggacctgcgctgcggggactatattaccccggaacgcttcatcccccggcgcggatatcccggcgtggactgggaatcctgcatgacggtaagcgacaaatggggctacaaccgctacgacaccaacatcaaatctccggaaaccatcattgaaaaactggtggaatgcgttaccaagggaggcaatcttctgctgaacgtcaatcccatggcggacggcaccattccggaaaaagtggccgccaccatgcgcggcgtaggccgatggctcaacatcaacggtgaagccgtgtacggaacacgggcattcatgcagctggaccagcctgccaccatcaatcggcagggggatatcttcgtcttcctgattcccccgccggacaaggagccgacccagccgcccagtgaaggaaccatgaaagaattgacggcgggagcggaacacgcccgcatgcagccgctggatgccaccggctacgaaaatgacgggggaacagccgtcaccctgcccgccggctattccaaagcattgcttctgggggacaacaccgcccttcccgtcgtcaacggaacggtcctgttcaaggctcatgaacattccaaaactccctgttccgtcatcaaactgagcaaatagccattttccccactcatttttcctatggaggaagaccttttttccctggcagccggcaaacagccttcacagcaggcaacaaatgaaacggcaccccgggccggggaggcgcgggaaaatgccggcaccgaccaccccggaaacgcggaggaccccgctcaccgccgcatagactatttgcgttccgaactgcgccgccacaaccgtctgtattacgaacaggcggaaccggagatttccgacgcggaatatgacgccctgttcctggagctggaaaaattggaaaaagcccatcccgaactgtcggatccggactcccccacgcgccgcgtaggcggcgcccctctccagggcttcaaccagatcagacatgcggtgcccatgttgtctattgacgacatttttgagcagcgggacgcccccgtaccggatgaagaactggcggaattctaccataagctgtccagggcgctgcaaacggagaacgtgcccgtctccgttgagcccaagattgacggagtggccctttccatcatgtaccgcaatgggaagctggcttatgcggccacgcgcggagacggagacgtgggggacgacgtaacggccaacgtccgcaccatccgcagcgtccccctcaccctcccccccggcgcgccgcccgtgctggaagtgcgcggggaagtcttcatgcccaatgaagcctttgccaaactgaatgaagaacgggacgccgacgggctccccgcattcgccaacccgcgcaacgccaccgccggaaccctcaagcagatggacccccggcaggtggccgcccggccgctggccttcctggcccacggattgggcgcgtatgaaggcccggaactcagggacgcaaaagacttctgggacatgctccgccattgcggcatcccctgtaatgagccggtgtattacacggacagcctggaatccacccgccaggccgtgcgggatattgacaggctccgccatacgctcccctacggcacggacggagccgttattaaaatcagctccacggctacacggaaagcgctgggagctacggctcgcgcgccccgctgggcggcggcgtataaattccccccggaacagaaggaaaccaccctgctgaatattgtcgtgcaggtaggacgcaccggggtgctgacacctgtggcggaattgcagcctgtgctgctgtccggttctacggtagcgcgggccaccctccacaaccaggatgaaatcgaccggaaggacgttcgcataggcgatacggtgctggtggaaaaggcgggggaaatcatcccggccgttctgaaagtgaacctttccaaacgcccgcaggacgccaggccctacagcatcctggaagccacgaaagggctgtgccccgcctgcggcaaccccatcatgaaggaagaagggaaagtagcctggcgctgcaccaacttcacctgccccgcgcaggccgtcacgggcatcacccatttctgttcccggtccgctctggatgtggaaagcatcggctcttccgtggcggaagcgctgagaagctccggactggcgtcctccgcgctggaccttttctccctgatgccggaccagctcgccaacctgaacctgggcacgccggaagaaccgcgccgttacggggagaagaatgcccggaaagcgctggacgccctgcaaaacgcgcgcgggcttcctctggagcgctggctcatcgccttcggcattcccctggtgggggaagttgtcgccaaggcgctggcggacacgcatcccgacctgaagcatgtggcggattcgccctacctccgggacatcgtccgcctggatgaactggtggaacaggccgccaaaaccaaccccaacacccgcgaaaacaaaaaggcggtgaaggaaggcgcgctttccgcagaggcggtacaggagcgccaccaggaactgatggaggaaatcgaccgcctgaccgctccctatctggcaacgggctacctgcgtaaaaacacggccaaattcagctatggctctgaaatcggcgtggcggcggccaaatccctccggagctttttcgcctccgcagcagggaaccataccatggatgtcctgcacggactgggcatcaatccccaatcccaatcttaccgggccagccttctcgaaatcccggcgggctccctgtccggcaaaaccttcgtcatcacaggaacgctcagccatccgcgggattactttgaacagcttatcgcctcccacgggggaaaagccaccggagccatctccaaatccacctcctgcctcctggcaggcagcggaggaggctccaagcgggacaaggccctcaaactgggcgtgcccgtcatttccgaggaagacttctacaaaatgatcgggaattaattgccgcaaaacagcagaaacgggaagcaggaactgaaacgcacgcatcatgcgcccggctgcccgtatcttcgtattcccttcgctttttcccgtgcgccgttttccggaaatttcattcctgaatccagcaaaaaagcttgctacgggcagccatctgtcccctaataaaccggtatgctgaacctgcccaatgccattaccctgacgcgtattgccctggtagtcgtctttacggcagcagtcagcgtcgcggaccggtattcctggggatacctggccgcgctggtcacgttcattctggctgcctgcacggactggctggacggctacctggcccgccgcctgaatcaggtcaccaccttcggcaagctgattgaccccctggcggataaaatagccgtctccgccgccttcatttacctgacgggcgaagggctctgccccgcctggattaccattctcatcatcagcagggaattcctggtcaccggactgcgccagattgcgcaggatcatggcgtcatcatccctgcgggaacgtccggcaaatggaaaaccgccttccagctggccttctgcatcgcctgcctgctggccctgacatggacgcatacgccggaatacctgccttccatcacggaccggctggccgcgctctgcctgtggcacggttccggcgcttccaacttgctgtaccaggttacactgtggggttccgtcatcctgaccgtttattccggagccgtttactgcgcgggcgcccgcaaattcctgcagcgttgaaaattgccttttcccccatccgtccggagacagaggcaacattgttcattctccgggacatttcatataccgggagcatgatttcattccgccgggttcctgtatgaaagaatgcatgcggaatcttccgctgtcgcccttcctgcacatgctgaagccttggaacgttcaagctgtccatcctctcttccggaagatgaacgcctccacggctctcaagccgccttacctgtccttgacattgcgttccgcaaaaacatttaaaggatcatcatgtttgcccgaaggtttggcattaatataatgccccctcttttccacgccatcccacagcgtttccaaatccataagaaagccgttcctatcgtatctccccaaagcaacagctatgctgtatactgaattaaaaacaagcctgtcattatttctcggataagcaaaaacatctttagaccccctgtttttgggaactgtggcaaaaaacaggaatgagccttcttcggaatttctgattgttatttttccattttcatcaaccaaaatttttaaagtatagaaaattcctttcttcgtatcgtgagcacataaatgcagccattcctctctattcattctgtctatgacgaacctgccgtcatcagatgaattcacgcaagcttccaaccggtacaaataatcgttgctgtcttccgtataccaagctttatagttttcagcattgcgctttttcttattaatcagaataccgaattccaccatcttttccttattttttgcatacagagtatcttgctgtttaagtcggataagatctccttctatgacaaaatttattttctgatccacccattcccaacgaggttcattaccataggaaggagtaaataaatgttttcccgtaaaaagatttacgcgctcagaaattcgttttttcctaccgtgaacgctttttaaatatttcatattgaacaaaccatcttccttaataaaatctttcggatacccgaattcatattttttcatttcttcataaagagcatcaatcagattctggtaatattccacaccttcttctccatcaaggcgtttttgtttcgcttcagcaagaaatccgacaaatggatgctccttgccattcctgccggaatccggaaagccagcttccccgctccgtttttcctcccgcgtcagatgctccaataaccgctgatcagcttctgaaagtttttccagtaaaatggtttttatttttccaccatttgcaagtaaccggattttgttgccatctcttccctcatacgctgcctttaattgatggcctgtcaccgccgtccaaatccggggtttgctcaaatccatcccctcttccggctgaagccccgcaaaaagagggctgccgcaacatacggacaacacgacaagaaaaatgccaattccattctttacctttgttttaagggacataactaattcaacatcgtctattcaaaggaaagtatacggatgaggaatccgctgattgggacatgcggcctctaacatgtcagccggctccctgatgcagataaaacctgtaccggaacaggaaaagagcctcttgggtattcccccctaaattgtccgccagaaatcaatcagtcattcatattcagaatttagggttgacggcggattcctcacccgcttcatccggtaatttattcatattcaatttctataaaaaaatcatgacaagaactgtttttgaagcggagatacggaacactaacaggacaaacgtttttattttccttgacaggagattttcgccgtgttttgataagttcgttcccgctgaatggtgtttggttgttgattgttgatagtcatttgcggttggcggaatacgggcgtctccgtattgatcttttcagtatcgctcctgcgggcttttttgttccgttattgccgtgattccgtcagttcattgcagccgaggcgcgttcacagacacatccacagacatggtatcaactacattcagggagcttggcttgtcggctcccattctccgccaactggagaatctggagtacaagacccccactcccatccaggcagcctgcatccccctgttgctgcagaacaaggacctgatggggctggcgcaaaccggaaccggaaaaacggccgcgttcgccctgccccttattcaacagctttcaaaacgttccggaaagccgccgggccgccgggtaagggcgcttattctgagtcccacccgggaactggctgcgcaaattcatgaaaatatccgcgcctacgccagagggctgcatctgtccaccgccgtcattttcggaggcgtggggtatgcttcccagttcaaggaactggccggaggcctggatattctggtagccacgcccggcagactgatcgaccatctggaacgctggaccgtcagtctggacggcgtggaaaccctgattctggatgaggcggaccatatgctggacatgggattcgccccggccctgaaaaaaatcgtctccaaaatcccgaggaaacgccacacgcagatgttttccgccaccatgccggacaatatccggcaactggcccagaccctgcttcagaaaccggaaacggtgagagtctcccctccctcctccacggcggacagggtggaacagttcctttgcatggtcggctcccagtcgggaaaaaggctccttaccctggaactgctgaaacagcaggagttccctggccgcacgcttatctttacccggaccaggcatggagcagaccgcctggcttccttcctgtccggaaaggattatccggcttccgccattcacggggacaaaagccagggtaggcgcgaacgcatgctcagtgaattccgttccggggaaacgcctgtcctcgtcgccacggacatcgccgcccgcggcattgacgtaaaagacgtacggcttgtcatcaactatgatttgccggaagaaccggaggtctatgtgcaccgcatcggccgcacggcgcgtgccggagccgccgggcaagccatcgctctctgttccccggaggaaatcaggaaagccaggaacgtgcacaagctgttgggacgcctccttcccgtgcacgcttccagcgcctccgtcccggctgaattgcgcgcggtcccagaagcgcgcaggaaaagtagcagctccatgcaggaaaaacgttccgctccccgcaggaagccgcggaaagggtacggaaggaacggcagccgtgcggaagcatgattttaatcattcaaaaaacttttgaacggaattgaagtcaacgcggtctcacttgctgcaaacggttctcctaatcgttccagtcgggaagcttcaaccggagtttcaatcatgaaaataacctcgttcatcatcaggacactatgcgcgggcaccgtcggttccctcgcctgccaggccgccatgcaggcttacgcggatgacgttccctccaccttcgtggaaggaaattattccccggaagtagcccgctacgtgcagagcatcgcaggcgtggcgctggcctcgggcattcatgattatgacgaaaacgccaccagcagttatcaggttctggctcaggtccttaacagcggcaatgtaacggaattgccggaagatatgaaacgggccattggaatgctgatcggctacgtccccgacccgaatgaaatcatccagcctatcatgtccagaaaacagattgagaggatgagaaagatggcggaccgcatcaagaacctgatggaggaaaaatacggagtggacctggaagactgcacgaacatcatgaagcgcactctggccccgtccatcccggacatcctccgctcctgcggcatggaaggcacccagctgcctgccaccaccgctttccgccccaggctgggcaaggctctgaatgaagcctatgccaggcttgcggcgccaaaacttcccgccgccggcatggcgcaataaccggaccatctacggatgatcgggaagataatcccgattccacggcacgcggccccctgccagggtcccctgaatagaagccgcaggaaacggaatgatcttccccttctccgggaacggaaacggcagccagcgccggcggcaacaaacaacaccctccggatgtcctccgatgcagggccgatccttcggaacgcggagcggcgatacgcccgctcccctgctttattcccaagcaacggcatgcaacatcggcacaaccggatgatgcccttacaggccccgtccttcccgcgctgcggcaggaccggggctttttcatatccgggattttcaaaaggcggcggcataccctcctgattctcttcaggaatcagggatattccgtttttacagaggaatgcattttttcatcatctgtgaaagaaagcttctcaagcctcagtatttatggcagactagggattcaaatccttcatacaattaccatccatggataattcatcatcacgccgtcgtttccttcagaccctgggcctggccactggcgcccttgctgccggttcctttgccaacgcccaggaagtagcccccctggctcccaggaaaatcaccattccggacccgaataacatcggccccatgaccacgtggcccccgcgcaagcccggcgccatctacatgggcggcttcagggctcccaagctggacaaggtgcgtgtggcctttgtcggcgtgggtgaacgcggttccatgcacgtgggccagatggccgttatagaaggtgcggaaattgtcggcatttgcgacctgtatgaagactgggccaagcgcagtgcggacgtcgtggaaaagaagacgggcaagcgcccccccattttcacgaaaggaccggaagactacaagcgcatgatgaaggaagtcaagccggacgccgtcatcgtctgccccagctgggaatggcactgccgtgttacctgcgacgtgatgaagatgggcgcccacgcctttgtggaagtgcctatggccgtctccatcaaggaactctgggaaatcgtggatacctccgaagaaaccaggaagcactgcatgatgatggaaaacgtcaactacggacgtgaggaactcatgtacctgaacatggtgcgccagggcgtcattggcgacctgctgtacggagaagccgcctacatccatgaactgcgcggacagatgaagcaggcggaacgcggcaccggttcctggagaacctatcactacgccaagcgcaacggcaacgtgtatcccacgcacggcctcggccccattgcccagtacatgaatctggcccgcaaggacgactgcttcggcaggctcgtgtccttctccagcccggccctgggccgcgccgcgtatgccaagaaaaatttcccggcggatcacaagtggaacaagctggactttgcctgcggcgatatgaatacctccatcatcaagaccaccatgggccgcaccgtcctggtggaatgggatgaaaccagtccgcgcccctactcccgcctgaatctcatccagggcaccctgggcaccctggccggcttcccgacccgcgtagccggggaaaagctgggcaacggaaactatcatgaatggattgaaggcaaagaaaaactggcccccatttttgaaaagtacgatcacccgctctggaagagaatcgggccgctggccctgaagatgggcggccacggcggcatggacttcgtgatgctcttccgcatcatcgaatgcctccgcaatggcgaaccgatggaccagaacgtttatgaaggtgccttctggtcctccgtctccgaactttccgaatactccgtggcccagggcggcatgccccaggtattcccggacttcacccgcggagactggaaaacgactgctccgctgggcatcgtccagtaacagccggcaaccttccccggcccgaagcttttgcgcctccatggcgtgtttccgggccggggcaaaatgcctcctcttccaaaaacaggcccagcttgcaggcggcctgttttttattgctccaatgacaccctattccggaagttgaaaggctccgcaggcactccacttgccggggaaagctcccggatgacgccaaaaagcggaactccatgaaattttccttctgcgcggaaccgtatttaggcaagaaaaatatcctgcagaaaaacgccgttccccttacatcacacacaccttcatgctttcctattgtaccaatattcatcccgcagaatcctgggcggaaaccagggaggctcttttcacctgcgttccccgcatcaggcaggaactcgcggcgatggactcccctctgaaggatctccccctgggcatcggcctgcgcctgtccgccagggcggcagcggagcttctggcaacgccgcacgccgcggaaaccctgaaatcatggctggaagaccagggcgcgcgcgtagaaacccttaacgggttcccttacggaaatttccacgggcagcgcgtgaaagaacgcgttttccagccggactggactacaccggaacgttttgaatacacctgcaacctgttccgcattctggcactcattggtgacgaacaggctgacaggctgaccgtcagcacgctccctgcctcgcacagctggtttcatgcggatgaagaacgcatcttctcccggctggacgccatgagcggattcctggatgtgctgggcaggcagaccggccgactgatgcagctggggctggaaccggaacccttcggccattttcacgatacggatggagccatccgttttttcaacggcctccgcaaccgttcccgccgtcccgaacttatcgaacgccacctggggctgacatacgatacctgccatttcgccattctccgggaagaaccggaattcaccctctccgcctgggaggaaaacaacatcgccctctgcaaagtgcaattttccaacgccctggaatgccgcatatgtggggaggaagacctggaacgcctccggcagtttgacgatggcgtttatttccatcagaccagcatcctccaccgggaaggcgccatgcttttcccggacctgcccaatgccctggcctatgggcgggattatgcagaggaaatacgtgattcccaatggcgcattcattaccacattcccctgtacgcttcaccggaaccacccttgaaaagcacggaagaattcatccagaaaacgcataatttcctccggagccgcaaaggcccgcaaccgcatctggaggtggaaacctatacctggagcgtcctgccggaccacatgaagatccccctggcagcccagattgcccgtgaactgcattatattgaaaccctgtaaagccatgatgccccgcatgcatccctccgccgtcctgtcttccggattcctgctgctgtccaccggtctttcctcctgcacatttcttcccatgttttcctccggagggcaggaaacgccgcggaccctgggcgcacgcatggaaaaacacacggaagtcctgcaaaaagacatcggggaaagaaacgccagccagcccaaatccatggacgccgccgccaaatacatcgccgggaatttctcggacatggggtacgccgtcaccatgcagcccgtatccggaggaaacgtgaaaaaaggagcggtcatttacaacatcctggtttacaagcccggcctgtattccaacaatcaaagcatcgtcgtgggagccaattatgattccagcggacagcgcaacaacggcagcggaacggccctgctgctggagacggcgagaggcctgaaagacatccccaccaatcacaatatctattttgtcgcatacgcgaacggagcggagcccgcagggaaatccatctcttccggagcctgcgtgcatgccagcatcctaagcggcagcattggagcaaccaacatcctgggcatgatcaatctggaaccccagaagctggatgccggaggggaacgaaaacagccgggcccggaatcctcccgggaagccgttctgttcacgaccaccccgcacggcaagaaatttgcaggccagtgcgccgcccccttcgccaaatcctgggagcaggcgcccgctaccttccaccgggaaccttccgccctcacaggcaatgaccgccattacgcggtcctgggcattcccacggtctcctgccggagcaagtatcccgtcacggatgcccgtacggaagagtatgtgcaggcgctgacggacatgattcaccaggtagcggacaacgacgcgcccgaaccggcaaaaaacaccggccagggcgagaaagcatcctgacgtttccctctctccccgttaccgggacagctttctccttccgtggccgccgcccagcatcagcacaggcatgaaggaaagggccaccagcgcaataaccataggcatccaattgtcggaatacctctgcatcaggaacgaagtcagggaagggccggccagcgtgcccagggaataactcaacagcagaagctgattcatggtcaccagttcatcccgggaagcttcctcgcatccccaggccatggcaacagggtacagggaaaatccggccagccccagagcaatcagggagggagccatcagcccccccttcagcatcagcccggcacaggccgccgccaccagcagggactggcatttcatgacgaaagcgcggccgtacctgtccgccagccttcccatgggccactgccccagaatggcagcggcaatcagcagggccatccagtatcccacggaagagtggtccattccctggtgcttcaggaacaggggcatcaggcaataaatagtacccaataccacgccggaaatcacacatcccacaacacccagaaagacgctgcggcgtctcagcagtgtccgaatctctatatgggaggaggatgaaacctgtccattgcccggctccagacgcgcgaacatcagcggaaccatgcccgctactgataaaatgcagacttccgtcacaatcaggggcatatcgctggggaaccagcccagaagcaactgccccagcaccgtacccagataataaaccaccatgtaggaagccagcagaatgccgcgggtttgcagcgttccggccctcagcagggcgctttccaccaccacccagaccagggcgcagctgatccccgccagcagccggaggccgctccaggccggcacgccgggaaacacaggcagcagaacagtggagactgcgcataaaaggcatgcatattggtaacttcctttgaacccggcccggcgaatcacgccgccagccagcagcgttccggccaggttcccgagaaaaaagaaagcccccaccagccctgcctcccaggtggcggcctcaaattgctccatccacaggggaacaaccgtattcaacacggcaaacgccactgtctggaaaagaagccccgccagcagcagggcaataggccaggtaaatgtacgcatcacgataaagcggggactatagcaccaaagccgcatcagtcaaccgcctcttccgtcggaaagaaaaacaaaaaaagcgccccattaacaaaagacacaatacattgattgttaaattattaataaacaattcaaaatataggggactgtcatattccccggcgcagggaagcgggcagtatcttcatctgctcccgatatttggccaccgtcctgcgggcgatgttcacccctttttcccgcagcgcggccgccagcccggcgtcactgaggggtttggaagaatcttcctccgcaatcagccgccgcatcagctcctggacggcgccggcagccacggctccggaagccgccccgtcccgggaaacgccgccttcagacggaactcccgcactgaaaaaggatctcaattctttcatcccccacctgcacaacaggtacttgtcccggcacgcccgggaaaccgtggaaacatgaacccccatctcctccgccacttcttccatgcccatggccttcaggcgggacgggccggacctgaaaaaatcctcctgcctctgcacaatgacacgggccaggcgcaaaacggtctcctgcctcatatccaaagcccgcaacaactcctgtccctcacggaacgccctgcggagatattgcctcagctcccggcttccggaaccctcagccattaactccatataccgttcattcatggacaggcgcggaagatactcggaagtgaggataacctccagcacgccggaaggcccctcctccacaatgacgtcaggcagcagatgagggtttccgccgggggcgtaggctccccctggatcaggagtcaggctcctaatcacctccagagccgccgccacggcccccggttccacgtccagcaggcgtgcggcttcctcatacttgtgcgccgccagttcccgccagcagcgcttgaccaggcggaaagcaagcgaacgcttcaaaccgcgctgttcaagctggatcagcagggaatcccttaaattcgccgcccccactccgggcgggtccatttccctcagcgcagccagagcttcctccatgtcccgcatgctgaaacacccctgctcttccagctcctgcggagactccgtcagaaacccgcgttcgtccaaagcgtcaatcagcaggaacagggcgtcccgggcgcggcccgtcaatgcggaatgctgcgcctgatccatcaaatgggttttcagggattccggagccacgacggattcatacatgaaatcacggcgggcggccgcgtccccagacaggcggccttccgccgtaaactcgttccacccgtcctcccgctcattccaagcatccccgtccggaccgtcttccagcgcttccggggaagcgtccggcaactcatcaagcatgggattggtttccagcgcctgacggataatctgccttaattccaaagcggaagcctgaagaatctgcatccctgtctgcatggactgggagacggccatctggcgcgtcattccatgctgcagggatacctcactcataccgcccacaagctacaccaccccccggaatctggcaagggggaacaccctgcagcaaaagctgcccgcacaccgcagcagcaaaaaaggccaccactttcatgtggtgtttttggaaaacgttcatacaataaatgccaatgaagatcttacatatactttctttctccctgctggcctcccttctctcaacggctgcgccgtcccctctgactccgctgccacgggaacagccccaatggtggaggaagcaatatgaacagcaggtggaacaaataaagaacaacccctgcggcgtccttttcctgggagattccattacggactactggaaaagggaaggaaaaccaatatgggaaaaggcgttctccccctatcatccctgcaatttcggcatttccggggaccaaaccaccaacctgatttaccgcatcacggattccggcatcccggcccagacggaccccaaactctgcatcgtcatgatcggcaccaacaataccggttatttcaaaggaggggaagccccggaaaaaacggccatgggaattctgggtaccgttgaacacctgctggtcaggttcccggacacccacgtcctcctgctgggcattttcccgcgcggcacaggcccccaggacaagctgcgccagcacaacgaccgcatcaacgccattctggcccagtgcaagctgccccgcaccacttacgccaacatcaacaggcgctttctggactcctccggcaaactgctccccggcatcagcagggacaacctgcactttacggaaaaaggctacgccatctgggcggacgccgtgctgccctatatcaaaaaatactgcaaatagcattctttcccatcctcaacgcatgactgtcggaatgcccccttccgccagtcatgcgtgcggttcgggaacatatttgtcaatcaatgatgaagcttacgcagcaacaactgtccagccttcattcttgaaactgcggtcatggagcctgaaaagcaccgctcatgtccatcaattcatttttcccggcggctccgccctgaatgcttatgagtaacatccggactttgggtcgcccgctttaataaacggttaagatataaaagcagtacggtacatggaaagtatttaccgccaagcccgcaaaaagctgcatggatgccagggcccgcgtctgaaaattttgcgcagaaccgaagttgcagttgatttggaataaatatattataatgagacaatatatcatagacgcctttactgacaaagtttttcatggaaatcccgcggcgatttgcattttagaacaatggccgtccggggaattgatgttaaatatggccgttgaaaacaatctttcagaaacggcctttgctgtcaaaaaaggggggagctatcatctgcggtggttcacccccggtggagagattaacttatgcggtcatgcgacattagcctgtgcctatgttattttgaacttctatgaaaaagaagcggcaaaagttgtttttcaaactttaagcggtgatttggtggcagaacggcatggtgatctttatgaaatggatttccccgcctatgaattaaaaccagttcccgtaacggagcaaatgatcgacgctatcggtgctatccccagagaagcgtatatggggcgcgaccttttatgcgtgtttgacgatgtaaaaataatcgaacatctcaatccggatctatcaaaagttcatgccctgaacggtcttttgctccatgtaaccgcaaaaggtgcggaaactgactgcgtttcccgtacctttgcccccaaatgcggagtgccggaggatgccgtttgtggttccggtcattgtcacattataccttactgggcgaacagattgggaaaagacgacatcataggttatcaggcttccaaacgcggtggaacactttattgccgcatggatggagcacgggtaaaattagcaggaaaagcagccttatgttccattgccgaaacacaatcaaaatgaaacgtcaataggttaagaacatatgccgggcgacggaaaaaacgtcgttcgacagaaattatacattcccaatgacacaaacggaggttttgaacaatcaaggccgccgttcttctattccctaaaaaataatgcaactatgctttcaaacatggcggccaacgggaataactgccatgaagcacaaagcatgccgacaaattccgacgagatctatatcaaaaaatacatccgccgcagaatatcatatctccaaacgtgaatcataccatgtagcaaaagtgaatattttttcaaacttccatccggtatgcttgtgtctttacaggtgtgttttttataggaaatacaacaaaaaatcatgaaacaaccaaacctctcggccggaagtaggaatccagccgacccgcctgtgccgcatttggaatcaggaaaaagcgcaaggaacaaaaaaattgctttttcccggggatatcctagagtgcctcaccgcaatgagcatgccgcttgccgacttgatattcctggcgttcgccctctccgtggacgctttcgtcgtggcgttctcctacggtctgctcattaagaaaaagcgtttgagcaacggaatcaagctctccctgtccaccggggccggtcaattcctgatgcccgtgctgggttttttgcttacaggctccgtgcaccggtatattgcggcctgggaccactggctgggcttctccgtgttcaccttcctcggagtcaacgtcctccgcgaaggctggaatcaccgcaacgaagaagaggatatgccccacgtcgccagcctgacgcttcctacccttatggccgtgggaatcgccaccagcatcgacgcgctggtggcgggcgtcagcatttacctttcatccgtccagtgtgggaccggccccaccctccatgcggtgcttctccccgccgcctccatcggcttcaccaccttcctgtgcacggcggccggcttttttctgaccggacggctgcaccgctttccgacctttcatctggaagcgggtgccgggctcatcctcatcggcctgggcgtcaaaatgctctgcgaccatttgtgctgaaatatgcaacaaaggatgataaaaacgtctttccggcatcgtaataagtcgaaaaacgcactggtttcctcccccctctttctgctattatcaagaaatcccttccacatgaatatttcacatcttcttctctgcacctctctgctcgcggcgcccgtctgcgctgcgcagggcctgacggaaactgagacggaaactccggcctccgccagccgcctgccggcgcccctagcacaaaaaattgcctccggagactttgacggtctacagacggagctgcgctccaccctcctgaaggctggagaacaaacgaaatccgaacaaaaactgctccagaacaggcagtaccgccatttgctggacatgcacgaatttctgcgcgtcacgggaccggacaaagtgaaagccgttttctccaaaagcgcacaggatgccgctttcatcaaaacctttttacaggacccggcgtggatggagctttatcttggagcgggcctgattccggaaaattcaccggaaggccttcaaatcctttccgacatctggaaaacggacggcaagagcccggatttccggaattaccaatccctggccaccggactggcctctgtcttttccaccggccccgtagcgggaagacttaaaaccaactccgccaacagcaatccggtgcgccgctaccggattttcaaaaaactgcatcaggaaaacaagctgcatccgggattcatcaaactgcgcccatgggaaatgcgcttcgtcgtgggaagtccctgggacgacaaatcctacgaatggagcaacgaacatgtcaacctcccctggcggcggtacacggccgcctgctgggccgccccctatacgggccacaatttctttggcgataccattcaggggccgcttttctacgtgccgtggagggatcttcacacgactgcggaaaacacgcagatcatcggcggcgtctgcggcggcctctcctacttcggcaccatagcggcccaggcccacggcatcccggcctatccggtagggcagcccggccactgcgcgtacgcggtgcgcgtgaagcggggggaatggaaaggcggcttcggcggaccggacggaggcatgcacaaccatatcttcggctcccaggctccgacttcctacctgctgatggaaaatgtctttgctgacaacgataaggcggaccaggcctacctgtgggccgcccaggcccgactggacgaagcttccggcaacaaggacaaggccatccaggcatgggaggaagcgctcaggcaaacaccgctgcacccgttcttccgcacggaacttcaacgcctgctgatggaaaaggaaggcatgcagcctgtcgactggtacgtttacgccaaggacgccctttcccactatcagggcaacggctttgccgcattcgacatcctcaaggacgtgcagaataaattcctgatggatattccgcccgcggaccggattgcctggttccgggacctgcatgaagccatcgccaccactcccacatcatgggcagtgaaattccagcccgtgctggactcccaatccgccttcctggcaaatccgcaggaaaaagcggcctatctggaaaccgtcctatccacccacctgaaaacgggggacggcaccaactttggccaggcgttggaatggggcgtgaaaaactttgtggaaaacggacaggcggacgtcttctccaacgcgttcgccaaggtagcccagcaaacgggaaaaaccgggacctccggaaaagcccccgaccccaaaaagctgaaggaagcctatggcaaagccatctatgccacggaaacggcccgctccattccggccttccaggccttgagccaagcagcggcatctttctccggcgccaatacgacgaacaatacggtcaaggcgtccattccgcagggctggaaactggtgcccgcagacggcatggtccggtgctccaccacgagccagtgggacagcccctgggaccatatcaacctgctgcgtccctgcggcggcgcccagcatacggacaaagagtccaatccgaacgttattgtagaactgaaaaacggcgtgaatctggccgggctggtagtcaccaagcgcgacggcaatgaaaaccggatgaagaaaatggaggtctccacgtccacggacggagccacctggttccccctggccgccacggaaaacatgcccaaggaatgggtcatcaccgctccggaaggcaccaaagccaagtggatcaaggtggaagccaaaaacgcacagccggaattcatgcacctgcgccatatcctcgtttacgaaaaataaattctccattaacgccatgcttcatcacttcaatcccgtttccggcctgctggccgcagccctcttcctgtccgcccccgtccaggcggctctccccgcttacagcgccgtgaaagacgaggcgaaaaccgtcaataaatacatgatcgtcgtatgggccggcacggactggtccccaaaatcacgtgaaatcacccgcgctgtggaacatctggccaagaactccccggaacccgtgctctggtgtatccaggacgagcgtgaagaaatgacggaagaagagcagaaactgcccaagcccccgggggaaatctggaacatccccgccatccaggtggtctcccccaccggaaacatggtattcctgtcggaaggcgtctccagggaaacattgccagccgtcatgaagcaggcaatggaagccgtaaaacagcaaaacaaggccaatgccctgtgggaaaaagccgccgcttcatccggaacggccgcggcccttctttacggagaagggcttcagcagcttcctccttatgcggcctcttccagaaaggatattctggaaaaaatcaagaaggcggatccggaagacatcaagggagtgcactttaaatacacgttcaggcatctgccctacatcgaaaaagtgcagagaatggtgaatgattccgccaaagacggcggtccaaaggattacaaaaccgcccatgcctatgtaaacaaacagctcaaaacccccggcctgactccccttcaaaaacaacaggtcatggcggccaggttctggctctaccgcaatgaggggaaaaaggaccaggcgctgaagaccctgacggacatcgccaggatatcccctaaaaccctcatgggaataggcgcccagaactactaccgctacctgacggaacccgtcaccctgaaaagtcctcacttcacaggctacgacctgcgtccggaactgacgcctacccgcgtcaacgtcagcagcatgcttgacggccccggaaactacaagatcaccttcaagatgaacagcggcggctgcaatatccgcaacccccgcttcatgaagggcaaccgcgtagtcagcgaactgcccaaggaccgacaggacaaaaacgggcgcgaattcaccctgcgcctctccggttccgaaaagccggacctggttttcgactgccagggccacggctggtttgatgcggattgcgacatcatcgtgaccaaggaatcctgattcctgccggcaaacaacaaaaccgccataccacaaccttcactaaggcaggacatccccaagggatgtcctgccttttttacggagggataagaatttccaaccggctctcaagcgaaatcatcccctctttccctgccttttgccggttcaggccgaacaacattcccggcagcttcaagggatcaataagggaaaccttcttctcattcccgcgttttcaaggaagaattaccccttcttcccgccttccccggcgttctccgccagttgacggcggtattccatgcgttccctgatcctcagttccatcccgtttccggtgggggtgtaatacacgcggccttccgggaggtaggcctggggtacgtaatgttccggatagtcgtgggaatacagatattccagcctggcggcatccgctcctccagcggcagccagcttcttgcgcgttggcgtccgcaggtgttccggaactgccagcgttttcccattgcgcacgtcatccatggcggcattgatgcccacgtaggcggaattgctcttgggggccgtcgccaggtaaaccgcagcatgcgccagaggaatgcgtgcttccggcatgccgaccatttccgccgcgcgcgccgcgtccaaagctacgcgcagggcgttggaatccgccagccctacatcctccgacgcggcgatgaccagccttcttcctataaagcggatatcctccccggcttccagcatcatacccagccaatacagggcggcgtccgggtcagagccgcgcatggatttgatgaaagcggaaatcgtatcgtaatgggaatcccccaggcggtcgtacctgatagccttgcgctggatggattcctccgctacggagatgtccacatgaatgatgccgtctttccccgcaggagtggacagaacagccacttccagagccgtgagcgccttcctggcgtctccgtccgccttggcggccaaatggttcaaggcttccacctccatatccacgcgggatgagcccagcccgcgcacctcatccgtcagggcgcgcttcagcagggcggccagatcctcctccggcaccggctccagcggaaaaacctgggagcgggacagcaggggggagttaattgcaaagtaggggttttccgtggtcgccccaataaacctgaccgtacccttttccagatggggaagcagaacatcctgttgggctttgttgaaccggtgcagctcatccacgaaaagaacggttttccgcccgtgcatgctcatcctcatctgcgcctgggctattttctcccggatgtccgctacattggattccacgccgttgagcatcatgaaatgggcattcgtcgtccgggcgatgacggcggccagagtagtttttccgcacccgggaggcccgtagaaaatcagggacgtaaaccggtccgtctcaattgcccgtctcagcagcttgcccggagccagcagatgcttctgtccggccacttcatccagggtgcgcgggcgcatacgcgcggccagcggcatggcggaagtgtccgccccgggctcaaagccttcccgcgcttccgcttcctgtaaactgaacaaatccatcggaaacactttacccggttgaaaggccggagaaaaggccaatccccggaatcctgaaagtttggcggaagcgacaccgtcctcccctcaggacggaaaatgcacctttatccaaacatggaccagcaggacagcatgaaaaccatgctgacaggagccaaaatgctgaacagcagccccgcaacagtcaatcccctgcggttcacctcccagtaatgaagggaggcgatcagcatccagatgggaatcacaaccatgtggacgagagccaggagcccccagcccgccagcaccagcaaaaagagccatgactgcgagccgtccgcattattgctcggcatgacaaggccaaagaagcggtacacaagcaaaaagaggacgaatacggcaaaaggtatccatccccagcgggcatcctccttccggcgggccatggccaattcaaaacagggatctttaaacgcaggcaattgcttggcagaagaatctctgaagaaatacatatcgcccgaagtctctattattacacctttcttccgtcaataacattcaatgccagtccggattttttccgcagaaaatttttctttctaacaaatacgggatattggcttccgcccattaccttattgtcaaacaaaagggctttgaaaattcatgaaatgctcttgattataaataatttccccctttttcggatacttgctcttcgtcttttcccttgatgaaaaagtctttttgcatcatccgaatttcaacacccgttcaatttgtcatacacagtcccggtttcccataaaaaagactgcctccgctgcaggagcggagacagtcgggggcaatataaagccggaaattaaggaaggttatttgcccagaattcccttgaagtattccagcgtcgtcgccaagccttccggcaaagtatgcctgggctgccatccggcattgcggagcttgtccgcacaggcgcgggaatgcttgacgtctcccggacgttccggagcatgaagcaccttggaggaagagcccgcagccttgatgatgttctgcgccagctcttcaatggtgatctggccgccgtaaccggcattgaacactccggtgacttccgggtgttccgccacaaaggtaagggctcctacaatgtctttcacataaatgaaatcgcgcgtctgggagccgtccccatacacggtgatgtcttctcctttgacagctttttcaatgaaaatgggcacggccgcagcataggcgcccttggggtcctgccgggggccgaagacattgaagaagcgcacggctgccgtattgatttttccttccgcccggaacatgttgaggtagtattccccatccagcttggtaatggcatagggactcttgggctccgggtacatggcttccagtttgggcaccgtgggattgtctccgtaaatggcggcggaagacgccagcacgatttttttgactccggcggcggaagcttcctccagcacgttcagcaaaccgttgacgttgatgtcgatgcattcgctgatcttgctcatggattccggcacggagacgagcgcggccatgtggaaaatatagtccactccctgcaccgcctggcgcaccagctcccggtcgcagatggaaccttcgatgaacgtgtgcctgagcccttccaggttcctgagatagcccgtgcgcaggttgtccagcacacggatttcctccgccttatcctgatagtgttccacaatgtgggaaccgatgaatccggcgccgccggttacgagaatcttcatgtttttccgatgttggtagatattggttaatagcggtccacaatggccttcatttcatccatctgcgcctcaatggattctaccagggccatctgcgtgcggcagcggtccaggttgtgttccggacggtggattttaaaatacacgtcaccggacaggtagtccgtcaggaagcggatgccgcattccatcgtgagcaatttgccggagaacggcagcaggctcttttccagaggcgtcaggaaactcttggcggaactcaggtaaccctgcaccagagcttcaaacatgaacatgcgcatcgtgaccttggagacgtccttttcatcttccgcggcgggagacgtggccgtccggatcatgtcgccgaagtcgtaaatggcggaaccgggcatcgtggtatccaggtcaatcacgcaaatgccttctccggttacatcgtccagcatcacattgttcagcttggtatcattgtgcgtacagcgcaggggcaattccccggatttcaggtaatccaccaccagatggcagtccgactcacgggaaaggtaccagtctatttccttctgcacttccttcacgcgccccagggggtcggactggatggcctctttcagagccgccaggcgggaagtggtattgtggaaattgggaatggtctcaaacaggggctctccgggcaggtctgccgtgagcttctggaattcgccgaaggcgcgcgccgcttcctggcactgcttggtagtttcaatctggtcatacgtgcgtgcgcgttcaatgaacgggtacacgcgccagcagttgccgtccgaatccagggcgtacggcttgccgtccacggagggaaccagcgtgagagtgcggcggtaagcttccgggcactgttcctccttcaggcgcttcagggcgtggtccgtcacgcgctttacgttctccatcagagggataggctgcttgaacacgttatggttcacgcgctggaggatgtagcggatacgctgtcccgcctgatccacccagatacagtaggtgtcattgatgtggccgctgccgtaggaataaccgtggacaaaatcgccgcggagatcgaacagggttgatacagccttgagatcgtgcatagggaaaaaggcttagttgagcttttcagggtatacgccctgctggataagtttgttgatgccttccacaaccatgggcttgtcccccggataggtcatgccgaaccaggaggaagaagtgggaagaacggcgcaatccgcccggtccgcatgaatcagggcgtccaccacggtgggaataaagcattcgctcttgggttcctggccgtgttctttcaggaagtcaatgaaatgatcctccgtcagttcaatgaaggagggggagaacagccagaaattcatggaaaccagttctgcaggatccaccggcaggcgttcgcccttcaggttgttaccgcgcactacgccgtcttcgtcagcctggattttcacgaattcctccacgccatccagaaggccgcccttgatggagcaaatgccgcggttcacgtccccgttgtcggagagggtgttcttcagcggatagccgatcatgccgtaatgggccttgccgggttcatccgtagtggaggtcaggaacttggcggcctgcacaaaagcgtccgcaccgtaaaagtcatccgcattcactacggcaaagggttccttcaccacgtggcgggcggcacgcagggcgtgggcggtgccccagggcttttcccggccttccggcacggagaagccttccggcaggtcgtccagggactggaaagcgtaatccacctcaatcttgccggcaaaacggctgccgaccttttccttgaaaatatcttcaaagtcacggcggataatgaataccacttttccgaaaccggcccggatggcatcataaacagagtagtcaagaactacttccccgttggggcccatcgggtcaagttgcttgagaccgccgtaacggctgcccatgccagctgctaaaacaagaagtgtaggcttcatcatacgcaggccattatgaccaagcctccccgtttggcaacaggaaaatgccggaaaaccggagaaatccgcccgttaaaaaacgtaagagcaccaaagccccagcactacttttttgaaatcgtcccgcccgtagccgcaataccaccccaggaaaggctccacccgcagaccgctggaaacggcccacagcacccccgtgcgcaccatcagctctttcaagccgttcctccccagataatcatgggcaaaacccagggaaaccgtattcaccatggcgacggattcgcacagcaggggctgccaggtaacgccccactgggaatatacaccctcctgtccggaatcatacaggaaggaaccgcggaaagaccaggaaggggtgggattccatttaagggacaggcccggctccgtcccgttcttcaggggacaggaatcgtaccactgcccgttgacaaaaagcccggccgtacattcgtccgccagataatactggacttccccgtgtaaagtggcctgactgaaatggcggccctgccagttgcggatggcgaaaagttccccgctcaccgcccaggaatcagacagggaggctccgccggaaatctggccctccgtggaatcagcccccatcttttccccccggtggacatagtatgaacggtagccgccaagcatctccccgcccatgcggatgggggaacggccgtccacctccgtcaggggcggcggcccgtcataccccaggacggcctgcacggcacagcacaggatgatggaaaacagcctcatgaaagacttttaacacaattcgctgcgccgctccaacgccaaaacggtgcatgcacattctccgggcttggcaaaacggaaatctgcccttaccctctcgcgcatggttcatttcaccctgttcgggatacctgtttacatccgccccagcttctgggtggtgctggccattttcggcggtgccctcagcatcagcagtgtggaagatctcatttatccggccctgttcgtcattgccggcttcgtcgccatcctgtcccatgaaatggggcacgcgctggtgggccgcaagctgggcggcggccagcagacgattgttctggaactcttcggcggcctgacaagcagccatggcatgcaactgacgcgcggagggcgggccctcatgattctggcaggccccatgatgaccctgctgctgggcattatcagcctggggctcacctggaacatcgtcgctccagtcatgacttcttacaacctgaacttctgggacctggccatcagccccttcacagcagcgctcatctcccccaagctgtacattctctcctgcctcatcatgattggagaatggtggactatcctgaatctgctgcccatctaccccctggacggcggccagctgatcgcacagtacatccgctcccccaggaaagtattcatgaccggattcatcacggccatcctcatcggactgctcagtttccagctcttccacggctactttatccccatcttcatggccctcttcgcctacagcaattaccgggaatacaaaaacgcccccttttaatattattccgagtttccttcgcgggccctgcccgttctattcaacaaaccatccaatatgtctcagcaaaccgcaatcacccctacccgcgcccaggatttccccgagtggtaccagcaagtcatcaaggccgccgacatggcggaaaattccgaggtgcgcggctgcatggtcatcaagccatggggctacgccatttgggaactcattcaaaaggacctggaccagcgcttcaaggacaccggccatacgaacgcctatttccccctcctgattcctatctcctatctggaaaaggaagcggagcatgccgaaggcttcgccacggaatgcgccgtagtcacccaccacaggctggaagcgcaaaaggatgaagccaccggcaagacacgcatgattcccaccggggagcttacggaacccttcgtcatccggcccacctcggaaaccgtcatcggcgcggctttcgcccgctggacctccagttaccgggacctgcccctcaaagtcaaccagtggtgcaacgtgatgcgctgggaaatgaggccccgaatcttcctgcgcacggcggaattcctgtggcaggaagggcatacggcccatgaaacccgcgaggaagccattgaggaaaccctcaccatgcacaaggtttatgaagaattccagcgggatgtgctcgccatccccaccattcccggggaaaagacggaggcggaacgcttccccggcgcggaacaaacctacacggtggaagccatggtgcaggaccgcaaggccatccaggcagggacctcccactttctggggcagaatttctccaaatcccagaacatctgcttcgccggaagggacaacacccagcaattcgcatggacaagctcctggggcgtttccacccgcatgatcggagcgctcatcatgatgcactccgacgacgacggactcgtctgcccgccccgcgtcgctccccagcaaatcgtcatcattcccgtcacacccaaggaagaaagccgccaggccgttctggaccactgcgaagaactggcgcgcaccctccgcgccaaaaccttccacggccagccgctgcgcgtgctggaggacaggcgcgacctgggcggcggagccaagaaatgggaatgggtgaaaaaaggcgtgcccgtgcgtctggaaataggcccccgggacctggaaaaaggctccgtctgccttcagcggcgcgaccggtcctccaatgaaaaatccttcgtcccggaaacggaactgctcgataccgctgcggatattctccaaagcatccaggacaccctgcttcagcgggccattgccttccgggactcccatatccgccccgcctccactctgcgggaattggaagaaaacttctccggagagggagatgcagactggctccaggtgccgtgggacgggtctccagaagaagaagaagaactggctaaacggctgcgcatttccatccgctgcatcccgctcggcgagctgggccgcggcgagccggcaccctgcatcctcaccggacgcatgacgaaacgccgtgttctctgggccagaagctactgaaccctgacaccccctttcaacgggattgttccaagacaggcaaaacgggccttttcggaacaatcccgttttttacgcctctccactttccccaaaaacggcatgaacaagaaacggagcggcataccccacagggcagaattctcccctctcctgccccatacgctggcaacaacgcacacatgtcggcaaaacaggatttttctctaaaaaaatcttgccaaggcaaaaaaaccttatatacttttggcacacggacgccgtaaggctccaatcgttccaagcggatgtagctcaggggtagagcgcaaccttgccaaggttgatgtcgtgggttcgaatcccatcatccgctccaacttttttataacaaaaggcccgcacagatgttgatgatgtgcgggttttatattatggttcgtacagaaaaacctgcccccctattgcaacaccgttccaggaaacaattttcatctgctctgatgaggcccaccggacgttcctcctccatgcatttcatggaaatgttgccgaaaggcggcctccgtcaacgttgcagacgttgccggttatcacaggcgcatcctgtattattgcttaatgattcagtatttatcctccgggacacaggcggacttaatgatcaccggatcaagaacctgccgccatctgtcatatgcggaatgatataacgcaaatcaggtttcctcatctaagcattcgaatattcgctgaagaatcagcgacagtttcattcctgccacgttctattctctcttgacggccagactgaccataagaagcgtattcgtgcaaagcacactgtcctgaacgattccccagatagagcgttcgtgttcttgaacgtgccgtgtgtatagtacaactcttccatatgggtttccgtctcatcgtagacagaaaagcgaatgtttttgtcgaatagcgttacacaaactataggaaacaggatcaatgatggcacatgcttaaaataatcttataacgcttcgttcatcaactgccgcagaaagtcggtcggcaacgatgagaatctggctccctccatcaagaattagaaaaagataaaacaagcagagcgatttccgtagaaatagggaacataattccgcatttatttaatagaaaagtctccaaggaaaatatattttttcgcaacaaaccctgtaaggcttttcctttgattcagggggaattttgatttgtacttcgatacggcagcctttcacgaggttaggattgtttaacagatactcctcaacttccggaggaatccgggcattcgttccgtcttcaacaacgaaacaaatctgacaagttttacctctccaggaagctccatcgcctattaatttcattccatgccgggcaaatatcttatggagttccaaatcctttttcactgttttcaacagagttacactcctctccataccgtttcccgtatctatggccgaccagaagagggagaacggtaaataaatgaagtaaagagcggctattcctatgacgatccacattttctttttcatcttaaataatttattaattctctttttgtttattcacaaggcactcttccttcgccatagcctctatgcccttgaggagctggagccagaagaggagtatcaggggcaaacggggctacaaaaccagctccttccacgattgcacacgaccatccgcagcaatttcttgctcccgagttgtatagtgaatattgcggaacattcttttcatcttcccggatctgttcttcaactttacttactgactcaggacaggctttataagtgtaggaatttccagaatacgcatgtttttcattggaggcatcatcctgaatttttccggctccaacgcctaaagcgcctttgtgccaacttccggggtagaggcctctctgcatattgggcgttttgacccaagcatgtcctacatttcctgaccagtagctgcatggtttaaccagaataaaaatttcctgtacttcatattcgcagcattcccttcctgcgtcatccgcaattttagagtattttacaccatccttgcaacattccgtttcagcatcttcagaaaggccaagcgtatcagagtacaggcatgtattgttcttgacgaagatataaagattccatccgctctgttcatcgacaggatctctgctgatccaccttccatcttggggattatagtagcggtaattgtaataaaccaaccccagctcgtcatcagcatactcgctggagaagcggaagggattgatttctgccgcattgccttccatcttgagaacattcccatacgggccgtattcgtacaaggctcgccggcccgccttgatgccgaagagcgccgttgtgttcttcaacgcgtcatgcgtataataaagatcttccacataagttcccgtttcatcaaagacgctcatcgccaggatgcgcgtggctaccggttccaggggaccccactggtacgttttacgcaggacggggtcagcggattccggagcgtccgcagcattcagctccacgatttgtagatattcgccatagatgaatctcttctggaaggcggcttggacaaactcacagagtttgcccgccgttggcatctctgtcgtaggcggtcgttttgactgtttttagattatgattcaatgacaatactttctatttacatttctacttcgaatgattgcgttttcattcgccaatatacatgtgatatctcacgattgccataaactctatatcgtgcataaacataatggtttatggatggatatattccaaccaattcagctttttgtacagaatttatatttttacatattttttgcggaattgaaaataaaaatagtttaataatcagcaaactcccaataattaaaatagaagataagattgtaagtgaaattatttttttggccatgggtttgtttttctattcggacagttttgatcacatgattctgagcttttaccactataatcgactcttactggaacaggattattgaaatctctgcgaatatcattgaaaaaatctatatcattatgtcctatatcaatacagccagcagaccctggagcatcccctccatgtatattaaagttagaacgaccataagtatctgtgccagaaacaggggttaaacgtccaaaccgatttccccaaggataagagcttcttttatcaatcctagttctccagggtgcataattgaggatgttatgacttgcgtaatcattccaatcagataaatcccaatttcctgattcagaaggatcatcagttttatttggaggcaacgtataatcaccttccggtaatggcccggcatttgcctctctctgtctttcttttgaaaagtcattaaaaaccggattgcccgaactgtctattccagacggttttcctgaaactgcctcccaacatttaaaacattctttgaaatcatcgcttacccgacataattgtttcccatcgaaaactaatctatccaaccctaaaacgtctacatatattgaaggcatatttgatatataaatatacatattgattcctccatttataccaataggatcttttcttatccaccgcccatccttcgggttatagtatcggaaattgtactgcacaagcccggtttcctcatcgaaatactcgctggagaagcggaagggattgatttctgccgcattgccttccatcctgagaacattcccatacgggccgtattcgtacaaggctcgccggcccgccttgatgccgaagagcgccgttgtgttcttcaacgcgtcatgcgtataataaagatcttccacataagttcccgtttcatcaaagacgctcatcgccaggatgcgcgtggctaccggttctaggggatcccacaggtacgttttacgcaggacgggttcagcggattccgaagcgtccgccgcatccagttccgcgatttgcaggtaaccctggtagataaaccgtttccttgacatgagcgcttccccttcatagacggattaataaaaattttgctagctattccgtgttaagaacctatcacgctccctatgatcatgatggcaaaccatccacccaacaagacaaaggcaataagatcgttttttgttagaatcaacaataaaactacacaatgcccaaaataagcttgtaagttgacctgctaacgcctctgatcccaagaaaatataggcatacttggagagaaaaatactcttgctaattattgattcacaacccaatggacagcatcattgtccccaaccgattattaaaggtgtataggattttataaaatatcgttttttgatgacatttgtaaattacattttttatttactcatacttgtattttaaatattccgcactaacgcctaggtcagtcacgttgaatcggcaatattatttacgctcttaaagtgatttattctgtaaaataaattttcagaatttttcctgaataactattcagatcaacgctccaaccgcctcctaatgtgaatggcggcaaatccggagtaacagtataataatcatcatgatcaattacttttagtttttccgcaatctcctttttttgttttaataaaatcgtttttgctttttcaagagcttcttcttttgttaatttatttttcatagattctctttcggaataattattttccaagctatttgatttaaaatcgcaagaaaatattgtaaatcccaatacaagtagcattataaatttcatattagtcgcgtgttataattgtgatatctccattgggatcggctctatccacattgccatatccgcgtccgacataaattggtacccttttacgtcgagcgaaattgagatctgcttccgagaatgggccataatcagatcttttcgtatgtgaatggtacacaccaaccattgtataacaagacgggcacggagccttaagtggttgacacgaacttgagctttttgttgaatttcctcttacaggtccagtatatattaaagtagaaagatatttatggcggcagatacatccacaatattctacttcagaaggttgtcttttgtcatttgcagttgccactgaagcagcattacaagccctgacacctttggaatcaacagaacaagatgaaagactctcccctgctacagctatagctatgatgataggtatccagattatctcgcctttcaaatctatcgccaatgttggagcattattcgcaaaattatatctgtttaacgatacatcttcaccttttagatctcgtccgatccatctcccatccttcggattataatatctaaaattgtactgcacaagcccggtttcctcatcgaaatactcgctggagaagcggaagggattgatttctgccgcattgccttccatcttgagaacattcccatacgggccgtattcgtacaaggctcgccggcccgccttgatgccgaagagcgccgttgtgttcttcaacgcgtcatgcgtgtagtaaagatcttccacataagttcccgtttcatcaaagacgctcatcgccaagatgcgcgtggctaccggttccaggggatcccacaggtacgtcttacgcaggacggggtcagcggattccgaagcgtccgccgcatccagttccgcgatttgcaggtaaccctggtaaataaaccgtttccttgacatgagcgcttccccttcatagacggatttttctaccctcctgttcagataatcgtaaacgcactcaatacgtctgtccccctgcgtgaagctgaccgcctgattcaacgcgttgtaggcggcttcccattctcccgtagacgtctgaattttcgtctggttgccgtcagcgtcataggtgggaacaaagggcggctccgtaccttcggtgatatccgtgtattgattaagccggttggcaacgtatgtggtgggaagggaatccgttccctcccgggaggttgtgcggttgccgatgttatcgtaggcgtaactgtatatgccgccccggctcatcgcgtcgctcacaagttcattcctgtcgttgtaggcgtaggcgtgggtgaggtcgggcgcggacgtgttgaaatagtctttcttcgtgacgggacgccccagcacatcgtaagagtagccggttttggccgggtagttggcgctgccggggcgcaggtagtcaatattcaccgggaggtcgcgcttttcttccagagtgcgccgccatttcaacgtgttggggtaatcaagagtgtccagcaggccgctttccgcattgtagccgtaggtgaagggcttcgcgacggcgttcagcgagacggaggaaagccttccggaggcgtcatgcccccatgccgtctgcaaggcggcggcgcccgcatagtccagacagtagcccgcgggcctccccactccgtcacggcggagggtcaagacgcttgccgcaaggccagccgtcgtttccgtttcctgttcgttatactgattgtacgtgaacgtgcgcgttccggaagcgtcttcaatttgcgtcagctgccccagatgattgtagcggctgctgatggagggggtaaaaccgtcgtcattaaaggtaatggaggtaagctccccggtaaggggggcgtaggagcgggaggcaacggttccccgcgcgtccgtcgtagcggaaacgcggttgagcgcatcataagcggtatccacatgggtggcattggcataggtcttgcggacaaccagccccgtagcgacatcgtacgtccaggtggtgatgtccccatccgtccggaggcggggatcagtagtgatgacatccccgggatcacggaaggtggaaaggctcactatatggccggcggcgtcataagcgtatacggcgggctgtatggccgtcccccattcggcttccttgcggccccggatatcataaacggaacaggctgttttaccaagggcattggtaacgcaggtaggcagatcaaagggctgggcataagcgtaggtggtcgtgttgcccgcggcatccgtgccggaaatgatgcggccggcaatgtcgcagacggcggtaaagacgttaccgcgcacatctgtgtccgcataggtgatgcccgtttccgtataagtgcgctgccggcgggcggttgcgccgtcaaagcccgtaaccgccgtcgtgaatccgtccacgacgcgcgtgagggcaacgctcccgacgccgggcacggttttcttctgcaggcggacagaaccgcctccatactccgtccactccacggtatcctggccgcggggatccgtcatgacgtttttgccggcaagaacagaactcagagcagagagcaggaccgcctgcttttgaagaacgggagtacctgaagaagtataacttgttatggaaacaagtctgtagatgccgtcttcacggctctcggccacataagcgtaatcagtaatgcgggagttcaggatggtcggttcatcctccagggcgacgattgcccttgtcctgttcccaaaggcatcataggcatagagtgtcggcgccatgtccgccagctgttccctgataaggcgccccttgtcatcgtatgcaagagtgcgcacgttttccccattcagggtattggcggcagcaatccgtacaagatcgccaaagccgttgacggtggagcttcccgtcacgacgcggggctctcccccctccccgcccggcacagcctccgtcgtacggatcccttccgccgtggcctcaacggtataaaggatatcctgctgcccggtgccgtaacgccgcactactgttccggaagggcttttccgggtgatgagcgtagcgccggcgggcgtggtaacagtttctaccaggccatccccgctataagagcggacggtggtgcgccccagaatatcggtttctcttatcaggcgccccagcaaatcgtattcccggctttccaccgtcgtcattgggcctgcatccctgcgcagggaggtaattttaccgagagcatcacgggtatagctcgtgatggtttccggagtgatcatggtttccccgtccgtaacggctgaacggatggtttccaccagctggcgggccgtattgtaggaataggaagtggtcactccattctcatccctctcccacaacgggccgcagcaggtcatcatgcgctcgtaaacgcgcccattggcgcgggtgcgctttacccaacggttctcaacgtcatattcataagaagacgcgtccgtcatggaccaggcgccatcggccagccgggcgtattgctcataacgcatgttattgccctggccggagacgtaagtaaccttccgcgagctcaggccggggacgctctctcccgctatccgcgtttccgcggtcactttgtaaagggctccgtaccggtccgtctcttcataaaaataatgcgtctgaatgccgtccatgccctgtttcatcttcaggcgtccgcgggcataaacattgggagccgtgccgagccaggattccttcacttccagacgcacgttttcttcccccaatgcggtggtgcgtttttccacgcgccgcacatgattttcctcaacgtaggtgtaatccgcgcgccaaagttccgccgcagtggccgtcaacgtcacccattgggtgaggatatccggatccgcctgcgtctggtcccgatacgtggtgtaagtgaccttatcgccggcttccgcccaggggacgctggacacgatttcacggccgaaacggtcgtatgcccacgttttgacacttccgtcaggagcagtttccttcgcgatttttcccatgccggtgtactcgtaagtcgtttcccgggcgtagtccgttccgtagccttcaatacggctggtgcacaaattgccattgcgggtgacggcataagtctcacagacgcgggagatgggagcgccgttttccccccgctggatggtggtgatgagtttccacgtgccggacgaaacgatctgcttttctttcagagtgaatatggcgtcttctccttccccctgcgccatgttccatgctccgtcggctccctgccagtagcgggtggtgtagggagcgcgcccggcggtctgttcggtaacggagagtctgcccgcagccgcgtccccggtaattgtgaaggttttaaaagggtcgcccgtaacggaataaaggccggtggaactgtttttcccgcccacctgttcggggagatagagggcgatgcggtaaccggactccgtgacattttcgatgttggcgagcccgtcccacaggttccatatttgccggatgcttccatccgaagcccgcacaatatccagctttccgtcaaattcttctcttgtgtaagccgcgccgtttttagcggtgtagccggtggcgtatttcaaggaagaggccgaacctgcggtatagttaacggtattgcccgtgtttgaacggatactgaggcagaattctcccgcccttgccggagaaacgaatctcctcccgaaccacgccgagcccccgcgcttggcggatcctgcaatgggggccacgctgtcccccctgctgccgtctccatccgcgtaacagtagtagttaatggcagttccgccgctcctgatttggaaagcggtattcgccccgatgcccgatgatggcgcggagatgatttcacgagtcatcggatgccagtaatgaagcgcacgtggggaccagagttcagccgagaatgtgtatcctaccatttccagcaatccctgaggcagacccgtcatgccccggaaagagccgaaattggtacaccagatcatttccgtcttgagcgtccgggcgaccacgcgcctgccggcggccgacgaaccgtaaagggtggaggaagagcgcgcgccgcgcgccgaagagctgctgctgccgccctcattgttttcacaggtgcagggatcctcatcttcaccgttatccccttctccgttgtcttcctccggacagggagaactggaactgctctgggagccattgccgccagcagcctcctccccgcattcgcacggcacgtcttccccctcatcttccgtacttacgggttccggataaccttcatccggctgataggaggatgaagaggttccatccgaaaccatgacttcaatggaataattaaggatggcgagattagtccattcaggaggaacagccacgttctcataagtcatgtgcacgcggtgcggtcccggttcaatggggaagctcaaacttttttccctataagaccctccatggtatttgccctccccaggaatgaaaattccctcgccgtcaacagtaagagagccgttatcatccacccccagcatcagacggcactccgccgtttcccccgggccgagcggatcaacgacaatcccccagtcccagctgccgctgaacgccccggcctctttgttaaacgggaccggcacacctccggacgctgtgagggaattatcaggcagagaattcgcatgacgctgaacctgttgatctttcataaaatccagataattgacgattgagggacgaacatcaaagaagacaacgcttctctatattcactattcttatgtatctcggaaaacggaacagatcaatgattcatttttgaataattgttactaattacaataaattattaccaatcaatattcttttaaaatatatatttattcccaacaaccggagggaataaccatgtttttccgcgctgcctgacatcccccgcatctactgccggccaaatggccatggggacgggctgaacaacttccccggcctccgttaagacaaactccggcagatctatctgcatcatcccttcaacgaaagggtctcccgtctggtcgtccagataaggccggtgtgggcactttctttacgccgtcccaattctcaacccggaataaaccaatgaataatacgactcaaccaggggctgctccaacaggccccgcaacaaccaataacgctccggcggtaaaatccgtcctccgcatgggagtattcactctcgccatgatcaacgtttccgccattgtcagcctgcgcggcatgcctgcggaaagcacttacggactaagttccgttttttattacattttcgccgcgatattctttctggtgcctgtttccctggtcgccgcggagcttactaccggatggccccaaaagggcggcgtttaccgctgggtaggcgaggcattcgggaaaaaatgggggttcctggccatctggctgcaatggattgagagtaccatctggttccctaccgttctgacattcgccgccgtttccctggctttcatggggcccggacaaagatgggatgaagcgcttgccgccaataaatggtatgttctcatcgtggtgctgtgcgtgtactgggcggccaccctgcttaatctgcgcggcatgaagacttccgcaggcgtcaccaaatggggaaccatcatcggaaccattattcccggagccatcctgatcctgctgggcctgggctattgggccggcggcaacccgatcctgctggatatgagctgggacaagctggtgccggacatgagcaatttcaacaacctcgttctggcagccagcatcttcctgttttacgcagggatggaaatgtccgccgtgcatgtgaaggatgtgaataatcccgggcgcaattatccgctggccattctgatttccgccatcatcacggtgcttattttcgttctgggcacgctggccatcggcttcatcattcccaattcccagattaatctggtgcagagcctgctgattacttatgacagctatttcagcttcttcggcctcggctggatgaactggattctggcgcttgcgctggccgtcggcgttctggcccaggtaaccgcatgggtgggaggcccttcaaaaggcctgtaccaggtgggactggccggcaaccttccgcccgtcatgcagaagcggaacaagaacaacgtccagatgggcatcctttttatccaggggggaatcgtcaccctgctttccatcatgtttgtgattatgccttccgtgcaatccgcctatcagattatttcccagctgaccatcattctgtacctcatcatgtacatgctaatgttcgcgtcaggcatttacctgcgctaccgggaaccgaatacgccccgtactttccgcattcccggcggcagaaccttcggcatgtggattgtcggagggctcggcttcctggccagcctggcggctttcctggtgagcttcatcccgcctaaccaaattaccgtaggcagcagtaccatgtacattctccttctggtggtgggcaccttcattttcgcgggtatccccttcatcatccatgccatggccaaaccctcctggaaacggccggtggatcccgaagacgcctttgaacccttcggatgggagaaaaacaatgattcccattccgcagcaacccctagccattccatatcccatgagtaacattccttccaatgaacagatccggacggccctggataacgcatacgcctacgccaaaaccgtccagggaggcaaaaacgcctcgtacattcccgccctggcccaggtgccttccgacctgctggctattgccgtggtcaccgtcaacggagacctgctgactgcaggttccgcggacgcaccctttgccattgaatccatttccaaggcattcaacctggcttatgtcatggatctgatcggcatgaagcagctacgcgcgaaaatcggagcggaccccaccggggaacccttcaattccgtaatggccattgagctgcacggcggcaagcccctcaatcccctggtcaacgcaggggccatggcgacggtcagcctggtcaacggttcggattccgatgaaatatggggaaacatgatccataatttcaataacttcgccaacacggccctgactgtgaaccaggagatttacaagtcggaaagcgctaccaaccagcacaaccgcggcattgcctggctgctggacagctacggctatttttacaatacgccgcccatgattgtggatttgtacacacgcatgtgttccctgaatatcaccgcttcccagctggccctgatgggcgcctgctacgccaacggcggagtcaatcccgtcagcaagaagcgggtggtgaaagaggagaacgttccccccattttggcggaaatgtgcatgtcaggcctttatgattccacaggggactggatgtacaaggccggccttccggccaagtccggggtaggaggcggcctggtggctgtagctcccggcaagctggccatggcggctttttcgcctcccctggatcccgcagggaataccgtcaaggggcaggcggcgcttcaatccatcatcagggaactgaatctaaaccttttccggagctgatccgggatgagaaggtaaacccgcggagccaaaatccgaaaggattcccgcgggtttactgtatcctgtccagctcccccgaggcagaccgcagtttctcgactgcggatttcagccataaaaaacagccttccggaacagtatgctgaaaaacggatatatccggcggacaacggccgcatcgcctgcgccccggcagccgcagacaacctctccccggcgccccacatcagctcctgtttgaaaagttgcacagctgcatggctacgccgtcttccataacccggaagccgtacttctcataaaaagcggcgtttctgctctcctccggcatgatttcaagatacaggtagtccctgtatttttccttaaccatttccaccatttttccagcaatccccctgccctgataggcgggatgcaccagaacataatgcatgtaggcaaccatctcgctgtcgtccagtacccgcaccagccctgccaggcggtcaccgtcccaggccgtaacaacagtggatgaattcatgagagccttgaacagacgccccggatattgtccggaaatccagccaacggacaggaacaattcttgaacatcttccctggaaaatttcttctcttccgtaaaaacaatcattttttctttaattaattattgattatccgcctgtaccgtcgcggccacacaaccgcctgagcgggaaacgcctttccctaggccggattgacaccctgtttcaaggttttatctgctcccactgccgcagtcaacaccgtcttgtccgagggttttacccatttcaaggacatggcggagcctgtgataagaatgcgcgccggaaacaggcaaccctttccccagtcagtagctcgtccgcccctgcctcctccgcttccgggggacggaagagccgcaccaggaacacacatcttcttttcagggaaacgatactcgaatacgggagacggcatttttcctggaaccgattccccaaaaacggaaaactccgggcccaggttcataacattgtgaaaaacctttctccgtcatttgtttaaggacttgtcaccacgcttcttttccctagaatccccccggtatgcttgacgccctccaaaatgcctttttccagaccggggacacgctcacatcctggctgtccgctttcagcagctttctgtgggggtggcccctgctcatcatgctgctgggcacgcacctgtacctcaccgccatcctgcggtttccgcagcgttatctgcttaaggccctgaaattgtattttgtgaaagatcatacggacaagggagatatctccccattcagttccctgatggtggccctggcagccaacatcggcgccgggaatatcatcggcgtgggcgtggcgattgcagccggaggccccggcgccgtcttttggtgctggctgacgggagttctgggaatggcaacccgttattcggaaggattactcgccatcaaataccgggtggagaacaaggacggcaatatgagcggaggccccatgttcgtgctggaacgcggtctgaacagcaaatggctggggacagccttcgccgtcttcacggccattgccgcctttggaatcggcaatctgacgcaagggaacgcagcggcggaacagctccaccacgccttttccattccctcctggggaacagccgccgttctgacggcattgacggctctggtgatgctgggaggcatccagggcattgccagggtatgcgctttcttcgtgccgttcatggccgtcatctatatcatgggatgcctgtatatcctgaccatacaggcagagtacatttttcccgccatccggtatattctggactgcgccttcacgggagaagccgccgccgggggcgcagcaggagcggccgtcatggcggcaatgagaaccggtgtggcccggggcctcttttccaatgaggccggcctgggatccgcagccatcgcctccgccgcagcgcagaaccgcaaccccgtcaggcaggcactcatctcttccagcggccccttctgggataccgtcatcatctgcgccctgacgggaattgtgctgaccaccagcatcatcgcgcatccggacatttcctgcacggacggccccaggcttactacgctggcattcagcaaaattccttacataggctcccctctgctcacgctcagcctggttacgtttgtagtttccaccattctgggctggtcctactttggagaaaaagcgctggaatacctgggaggcatccggctgatcatgccttaccgcgtcatctgggtggcggcggtcttcatcggctgcgtctctaaaatagaactggtatggatttttgcagactgcgccaacggactgatgtccctgcccaacctcatttccctgctggcactttccggcgtgcttgtccagcaaacgcggtactacctctggcagcacaggctggacgattacgacgaatcccacataccggaaggaaaataacgatttttttaactcggattcaaataattcttgcctttcggcttccggtagtatttacttcgccgcgcagtccctgcaaacctaaaagtcgcgttcgtctagcggtccaggactcccgcctttcacgcgggcaacacgggttcgagtcccgtacgcgatgccagctttaccgccgcggcagttacgataattccgcttttccccttttcagggaagcatattggaaaaacgtaatggctgcggttttcttttggcccggttttccggattcaggaaagcgcggcagaggcgccggaagcggaatcccccccctgcttttaaatgccggaacatgtcttacatcccccggatttggctttcagaaaaccccgccatcttttaaaatcctttacacgcaaacgccatggattacacacctctcattgaaaaacgccgccagcgcctggaagaattggaaacagtcattgccgaaccggacttcttcaatgaccagaaaaaggcctcggaaatcatgagagagcaccgccgcctgaaggaactcatggaaacatgggattccctgaacgccacggaacaacagctggcggacaaccaggaactggccaagacggacgatccggaactggcggaactggccgccctggagattccagaactggaagccgccctggaaaaactgcgaagcgacgtgcagtacagcctgctgccccgcgacacgacggaagaccgggacgccatcattgaaatccgcgccggaacgggcggggatgaagcctccctgtttgccggagacctgctgcggatgtaccagcgttttgcggaagaacgcggctggcgcttcgagcatctggaaagcagcccgtcggacgtgggcggattcaaggaagtcgtctgccgcattgccggggaagaagtgttccgattcctgaaatatgaaggcggcgtgcaccgtgtgcagcgcgttcccgctacggaaacgcaggggcgcatccatacttccaccgccaccgtggccgtcatgccggaagcggaggaagtggacatagaaatccgcccggaagatctccgcatcgaagtatgccgttccggcggagccggaggccagcatgtgaacaaaacggaatccgccgttcagatatggcacatacccacgggcgtttatgtccggtgcgaggaagaacgcagccagatgaaaaaccgagaaaaaggcatgaaaatcctgcgcgccaagctctttgaagccaaaaaacgggaagaggcggaaaaatactccgccgcgcgccgcaatctcatcggctccggcggccgtgaagaaaagatacgcacatacaacttcccgcagaaccgtctgacagaccaccgcatcggctacacttcccacaatctggacggtatcctgatggggcagctggaagacctgattatggccctccagcatgcggaaatgcaggaacgcctggcggaggccggaatgtcctaacttcctttttcctttcatgaaaactttactggaagtccttcaggccggcacggattatctggcccgccaggggtgcgacgaagcacgcgccaccatgcagcatttgctggcccatgtcctgcactgcaaccgcacggctctttactcccagtttgacaggcccgtggaagaagcggagctggcacccctgcgcgaactgctgaaacgcagggcagcgggagaaccgctgcaacatctgctgggggtcacggaatttttccggagggatttcctgacggatgcccgcgccctgattccccgcccggaaaccgaggaactggtggaaatggtgttaaagaaaatcccggaccatccggtacgcatcctggacatgggcacgggctccggcgttatcggcgtcacgctggcgctggaactcaaggagcgcgccggagaagtcgtgctggcggacatttccccgcaggctctggatctggccctggaaaatgccatgcggctgggagccagagtctccaccatccagacgaatctgttcgccaacattccccaggaaaaaacggatccgtatgcggaggatgccgattctgctccggagggagaaaaagaggaaaacgggcgaaacaagctctttgacgttatcgtggccaatctgccatacattgcagagggggaaaaacttgccccggaagtcatgaaagacccccatacagccctgttcggaggccctaaaggctgggaaatcattgaacgctttctggcccgcgcccgggattacctgaacgaagacggctttgtagccctggaaatcgggtacgaccaggcatccgtcgtaacgcaaatcatggatggatacggctacaattacattgaagttctgaaggacatgagcggcgtctcccgtttccctttcggctatcgttaatgttatcctccttttcactccatgcaggcggcgcgcattctggttgacggacaaagcgatctggtactggattacggtattcctccggaagcgggagatgtcaagccgggctgccgcgtacaggtgcccctgcgcaacagaacggctaccggaaccgtgcttacgctgtcagaaccggccccggcctggaaggacaggctcaagcccattctgaaactgatcgatccggagcccctgatttccccggtgatgatgaatctggcctcatgggcggcggactattactccgtggctctggatcagatgatccggtgtctgctcccggaaaccgttcgtcaggaaaatacggcggaaaaaatgcgcaaaatggtgtatctggaaaaaactccggcacaggaggaactggacgccctgtaccgcaaagcaccccggcaggcccaaatgctggattatttctcatccgcgaaacaacagtccgcccccctggcggcattcggcgccggagccctgaacgttgcccgcagcctggaagccaaaggcttcatctccctgaaagaagaggccgtgcaccgggaccccagcaccggggagcaattcgtccccacccagcccatgaagctgaacagccagcagcagaaagcgctggaagaaatcacggccatgtgcgcggcagagcgcaaaaaaccggtcctgctgcaaggggttaccggttccggcaagacggaggtttacttacaggccgtttcccaaatagtaaaatccggaaaatccgccctgatcatggtgccggaaatttccctgacgccccagacggttcagcgtttcaaatcccgtttcgcggaactgccttcctccgtggcagtgctgcacagcctcctttcggacggagagcgctttgacgaatggcatgccatccgttccggaaaggcacgtatcgtcatcggcccccgttccgccgtcttcgcccccctccaaaatctgggtctggtgattgtggatgaagaacacgacgcctcttacaaacaggaaagttccccccgctaccacgggagggatctggccgtgctgcgcgcccatctggaaaactgcgccgtgcttcttggctccgccactccctctctggaaagcatccataatgccctgattgggaagtattccctggtaaaactgacggaaagggcggacggtcagaagctgccgctcattcgcatcctggacatgaaaacggaaggaaagaataaatccggtcccaacgttatctccgaacgcctcaggatgtccattgaccggcgcctggacaaaggggaacaggttatcctgctgctcaacaggcgcggattcgcacgctccatccaatgcccggactgcggccacgttgtcacgtgcctgcactgctccctgcccctgacctaccaccgtacggaagaccgcctcatgtgtcacctgtgcggattcaaagcccttccgccccgttcctgcccggaatgccggtccgccaatatcctgctccaggggtacggaacccagaaggtggaagaaatcctgcgccgcacttttcctgcggcgcgcatcacgcgcgtggatgcggacgtagcccggcggaaaaacgccgtccggaccattctgaaccagttccgcgcccataagatagatattctcctgggcacccagatgatcgccaaagggctggactttcccaacgtgacgctggtaggcgtactgaacgcggacctggggctccacatcccggatccccgtgcaggggaacgcactttccagctcctgacgcaggtagcgggccgcgccggccgcggcgatctttccggagaagtcattatccagacttttacgccccagtccccctccctgcaatacgcccggcaccatgacacggacggctttgcagcccaggaactggaaatgcggcgtactttcgacctcccccccttcacccatatcgccgtcttgaccatacgttcccagcatgaaagcatggcggaattcgccacgcaaaccctcgcggcccgcctgcgcggcatgctcccccctcccgccacgatgaccgaccccatgcctgcccccatcccccgtgcgcacggacagttcagattccagattacggtcaaggggccatccgcccgcatcctctcccgcactctccggaaactggtgcaggaagccggcctgggggaagacctgacggctgtcattgatgtggatgccatgtcattcatgtaagccgccttgccaaaaccggccgggaacattagacttccggcacaacacaacttactattatgctgcttcacttctacaagatgacgggtgccggcaacgactttgtcatggtggacaatcgtgacctgagcctttcctccgtgctggacaaagaaaccatagaagccctgtgtgaccgccgcttcggcattggggctgacgggttgatcgccgtggaaccctcccagggcaaggggggaattgttcgtatgcgttattacaatgcggacggcggagaggcggaaatgtgcggcaatggagcccgctgcttcggcaactttgccgccgccctgcttcatcacgacaagacagccccccttccttttgaaaccatggccggcgtcgtcaccgcaacctttgaaaaagacgacaacgtcaccgtaaacctgaccaatccccactccatgcagctcttcgtactgaatgccgatccgactgtgggggcggatgtccatttcctgaacacgggcgtcccccatgccgttgcgtttctggacaagctggaaggcctggacatttccaggctgggagcctatctgcgttaccatgaggccttttcacccaaaggcaccaatgccaacttcgccagaatcctgtctccggggcacattgccatacgtacttacgaacgcggcgtagaggatgaaacgcttgcctgcggaacgggaataaccgcctgtgcgctgctgcatgccgtattgacggacgccccctcccccattcaggtggacgtggcgggcggagacacgcttaaagtcggattccaacgcacaggggaccgtttcactgacgtcacgctgaccggaccggcagaccttgtgttcaccggagacattcagatctaaacagcttcgacctgaaaaggcggactccttcccatcagggaaattatctgttcagcagggaacattccgcccgcacataaccgccgtaattattgcagaacgccttgtacacggcagggcccatattcgtttcgcaatagtactttacggtaatacagccgttttcgcgttccatattaagaaaacggctggacagcagtaccagattgctctggtaattccacaaagccatgtcacgctccatttcctcatgaatcctgtcgcatataaagctctccggaggaggaaacagaatggcgctgacaacaccgatcagacagattcccggaatgacccctacggcaagaaccccgtgacatttcctgaccaggggaaggtgattcctgaatttccggaaaatggtgaaacggaataaataacccgccagcagcgccaccgggaagaacacattcacgtactcaaaagccaggctcattcctccaagaacgaaaaaaccgatgcccttccacaccttccggtaaacaggaatgcaggcgcaaagaaacacgtacagaagatatcccagcaggcaaaggaaaggcagaagcgttcccgtaaaaatatgctccaccatgcagtcccacggatattccctgctgggagcgaaggcttcatggaaaaacatgcataccatgctcaaaagcaccagcgcggcaaggaggatagtctttactttttttgactcatacaaaagccacagtaaaacaactccgaacggcaataaatagcaacctatactgttgaatacagtggacaacatgggaatatgaggaaagaaattcatggagcggatatggataaatgagcggttaacaactaaaatgcagcagcggcttcagcaacattaattggaaataaaataaattcaaacactcgttttcaaataacccataaaaaatcatattcttttcacgaaaagccgttcagccgggctcttccacttgacaaaacaaccctctgaaaaggatagtaacgctcttgtgaaacactcccttttcatccaggccgtcctccttccggttctcttctgccttccccaatgcagccgcaaaccgctccttccggaatatacgcctctgtgttccggaatggtgccgggggaacacactgcccaccgggccctccgggcacgggaaaacagaacctaccgggtcggtccgaaaggcggcgtatattacatcaattcccataataaaaaagtttacatcaaatccaggagggtgcaatagaagatcacacggtttctccgtaattttccaaatgggaaacaaataaccgtcctatcatgtttttattgtataattgagaaaatattccgttcaaaaaactcattaaactcattttcttcttgccaaaatggaagaggacgggtaatgtctgccgcaccacaacactaaatggtgtcggtagttcaatggtagagccccagattgtgattctggttgttgcgggttcgagccccgtccgacaccccatcccctttccttcataaaaagagcacttatagtgctcttttttactatccccaaccctttccgcatgcgtaatccagaattcgtcaaagccgctttttccgctattgccccgcgctatgtggctaccaaccatgtgctgagcatgggtgtggacctgctatggcgccagcgcgtcgttcagcttgtctccgaatggaaaccggaaaaccttctggatctggcgactggaacgggagacctggccctggccatcctgaacgcgatgccggaaatccgcctcaccgggtccgacttctgccagcccatgctggacatagcggccaggcggggactggatcatctggtttgcgcagacgccatgaacctgcccttcccctccgcctcctatgatgcggtcactgtcgcctttggcctgaggaacatggccagctatccggacgccctgcgggaaatgggccgtatgctgcgcccggggggccatctgctcattctggatttttccctgcctgaaagcctgttgaaaagcccttaccggttttatctgcaccgcatccttcccgtcatcgcagggtggatgaccggccaccgggaagcatacgactacctggcggacagcattgaagccttcccctgcgggcaggccatgaaggctctgctgcgggaatgcggctacagcaatatcacggcggaagctctgaacgggggaattgccagcatttatacagcccagcgatgagtgcgggggacgcaagagaaggcatcatacgcggcaaggcggcacgcgcccgcctgggcggaaaacttgccggactatccctgccccggcaaatcgccgtgattgctttctggccattcctggaacagctgctgagctttttcgtcacctcgtccgaccttttcatcgccactaaaataggggtggacgcccaggacaccatcaacatctctgacggcatgggcgccgtcgtcttcatcatgtggttcggcttcgtcatccaggggtctatcatgatgggagccacagccatcgtttcccgcatgacgggcgccagggactatccccaggcccagcatggcctgcaccaggccgccatgctggggctcctggcaggaaccatctcctgcggacttctcttcacatgcagcgatttcatggtcacgcacgtactgaccatgaatgaaaccgcccgggcctacgccctgcaatacgtttatatggccgcatttgcggccccgttcagcggcgtggtctttgccatcaatgccgccctgcgaggctccggagacacgcggcttcccttctggatcatgatgagcgtaggcatcctcaatgtcatcttcagcgtcatcttcgtctttgcggacgctcctctgggcggctggcgcatcggaggaattgcggcaggaacggtctgcggctacggcatcagcatgtgcatcctgctgttcatcatgctgcggcgcagaaaaaaaatcttcacgggcaggaaaaatgaatccctggaagaacttgtccgggaacggggagaacactatgccccgcccctgtacctcagcttttcccatctgcggccggacatgggcatgcagaagcgcatcctgaaaatcgggctgccgcaggccgtggaagtcttcggcatgtggggcatccagatgttctgcctttccatcatcagtgaactgcctgttaaaggcgtgctgggcgtccacaatattgccgtccgcattgaatcgctcagcttcctgcccggcttcgccatcggcatggccgcttccacgctcgtggggcaatacctgggcgcccggaacgcgcttatggcccgcatcaccatctggaaatgcatgcggtacgccgtcatcttcatgacaggcctgggagtgctcttcagtgcctttcccgccctgttcatggagatattttccaacggcagcacgaccctcattgataccggaatccccgtgttgcgcaccatgttggtggtggaacccttcttcgccgcctgcatcgtgatgaaaatgtccctgcgcggcgcgggagacacccggagagtcatgcttatttcctacggcattatgggctttttccgggtcgtctgcacctgggtatggttcaggctggcaccggaaaccatgactttgtggggcatctggctggttttcgcctttgaaatggccgttcaatccgccatcctctataaaatcgtcaaggggcggagctggacgaagctgcaagtctgaacctttctccggcctctcccgcctcccggcccattcgcaaatccaaaacgtttactgcaggataaaaactttgctttcctcctccaattctgctagcatcctttcacgttgttctgcaacgggctcgtagctcagcggttagagcaggggactcataatcccttggtcgtaggttcgaatcctaccgggcctaccaaaataaagccttacaagttaaccacttgtgaggcttttctttctcttcccgcttctctcaaaaattattaaaaacgcgtaaaaacgtaccaaaacgcaagaaaagttgcaccactttagcatcaccatttttgctacagtagcagaaaccgcatgagaagaggagtcattgccggaattacaaatagctggcagaagaactgaaaagcaggaaaacttctcgtaattccctgtagattccttagatcattaggtcatacaacacacttatgcagagagtatgtaaactgtaaaaaacacccgatagcgacgaagttctttattctcacgattcatcggaaaaagttcttggagttgcagatgagaggatggatttaagacgccaaaaaccggaaataattctataaatcgcacagctttaagggttacagcaaattcagaaacacaaactactgaatcgtcaaatattctttcttcgagaaagaaaaacattgattacaggaattagactgatgcccggaagggatggcctcctgtcaagggctcagcatgagaggaaaacattttctaacaaacagacaacattgatgtctattaagggaatgcactgaacgtaagaattataatattatcttttcgtgtaaaataatgaccatcttttataaaaaatcaaaaacatacaaataaaattctatcgacaccgacttcagatcatactattgataaaacgatcaggaaagggcggcccccctcgcttccttcattacccccgactcttgaatacctgatgaatccgcctcatcgttcctcctccgtccatcgttctgccgttcccggctaccggaaatggtactttggagccggcggcagccccggcaggcggggcatggaggcagctccggagcccgacccgctgccatttgaagaaatccacgaacacgctgaaatcactgtgggaccgccgagcacgtcggcggacgggtacagtgcgcacgggacattcaccatcccggaaggagcggagggcaaaaaactctacggcacctgctcgctcttccttggggtggacgactggggaatcctggaagtaaaggactccggcggcaacgtggtggcgcaggtggatctgaaggaaaacccgcagacggcgggcgagcagggcgggcacaaataccacacggggaccggcggggcgcagctcccctccggcacctacagctgggaagtcagccagaccaacatcgactacaatccggcaagcggcaacacctccatctgcaactacagcatcgacgtggtgccgacggaaccggggggcaggaaagaacccgaaccgtgtccctgcgagggagacacgtgcgacaacagcggcggaacgccgccttccccgtcgctggcccggtcgggccctgaggcgggcatggaaagcggcgccctgggaaactacagctcggcggggtgcagcgtgacggcggaaagcacggccacgctgatgtactggtcctgcaacttcggagcgttccgtggacttgggggccttccggccggaagggtggaactgaggggtgaagaaaacgtctccggcctggaaagaccctcctcactggcctacaaccatcccctgaacagccgtctggacgtgccggaagggggcattgtccccggagcacggtttaatctggtgcagggagaccgggtaattgccatgcgctgctacacggacgggtccgtgctgcccatcggggtggacacgtcgggcggagggcgtgcggcgctggccacggtggaaggacaatcctgcctgcgctgggtggtggaagacggcagccaatacctcttctcggcggaaacgggaacgctcctctcctacaccaccacggacaggcaggtcatctccaacgcgtcatcctatctggacgtcaggcatgccggagacggctcgctgaggcaaatctggaacctgtgggacggcctgctcaacgtggaaaacgtcacctccacgggttacaccatcgcgctctatacccctgggcaaatcaccggaacggacggacagggattttataccgttacgggcgctcccttgaaaacatttattctttccctggatgctgaggaaaagttcaccatcacggaacaggcgcctgccaggcagccctatgccgtcacctggtggaacgacggcctggcgtggaacatgcggcagggcacgggggaagacgccctcacgaccctccgcacgcgcacggagctggaaccggaaaactcggtctggcagctggtcacggaaatctccaaaaacggaatcgtggcggcgcgcacctgcgccatctaccagaccacggacgtgggcgacctgctgctcacgctggcggaaggctacggaagcccggaggagcaaaccacgcaatacgcctacgaccagtgcgggcggctcaggacggaaacggccccggacggcagccagactcatgacgcctatgacctctacggccgcctgctctcccgcgacgaaccgtgggcggaaagcggcaggcgcatcacgcgctacacgtatgcgcattcgggggcggacaacttcaacgacgaaccggcctcggaaacggtagacctgcttccgctggaaggacacgtcaaaacgctgacatccaccacctggaaatacacgacggccaaccacatcaaaagaacggaacggcgggtcacgggcctgggtgtggcgggcacgcgcctgacggcggaggaacaatggctggccggagccgccaacatccatgcccgcggacgcacgcggttcagccgggacctcgacggcgtgcaaacgtggcacgactacgcggccacgacggagcacggcgccctctacacggaaacggtggaaacgcgcatcagcggagaagccgtgccgggacaaagcacgcgcgccgtcacctggatcacggcggaagggcagcgcgtcagggaagaaaactacctcctgctttccaccgggcaatgggcgctcacgggcagcgccgtctacgaatttgacacgcagaaccggtgggtgaagcggacggcgggcaacggccggctcacggaacgcgaactgatgtgcgacggaggcctgctgtgggaaatcgatgaaaacggcatcaggacggactactcctacgacacggcgcgccaactggtggaagtcacgcgttccgccgtgatggacggggaaaccgtcatcacgccggaaaccatcaccacctacgcccgggatgcggcagggcgcgtgctctccacgcgtcaagacacgggggcgatgactacccaagaaagcacggagtacgacttgctggggagaatgacttcctctacggacgtcctgggccgggtcactacctacgcctacagccaggacggcttgacggtcacgcaaaccgtcccttccggggctacattcatcacgcgcagcgcgccggacggaacggtgatggaagaatccggcacggggcagcggcacgtcatctacgccatcgacctggtcagcgacggtgtgaggaccttcacgaaagccgtctccggggaaacgcaaaccgagctgcagcgcagcattgtcaacggagccggggaaaccctgcgcacgggcgtccccaacaccgtcggcggagtcatttacacgaggaacacctacaacgccagggggcagctcaccaaaacgcagacggacgcaggcaatgcggccacgacgatggccccgaccctgtgggaatacgacgccttcggcaacagaacaaaagaaacctggaagctggccgatccggccaccgtgtccaactcgcgcatcaccgcgtggagctacggcacggaacagtcggaagacggcgtgtaccaggtcgtcacggcgaccaggaacaacggccggggaacgacctgcgacgaaacgcagaaaacgcttctttcttccctctcgtccacgctggaaagcaaagtcatttccatcgaccccaggggaaacgcttccgaacaatggagcgaatacggcccgggcgccgtccggacgcagaaaagcagcattcccacttccaatgtcatagcaacggccacggtcattgacgggttcaccgcgtcgcagacggaccatgcgggcgtcacggccacgcatacccgcgcctacacggaaaccggcgtcatctactccagcacggacggccggggcaacacggtcacgacgcgcaccgaccttgccgggcgcacgatctcggtgacggacgcggcgggcaacacgacttctaccgcctacggcccctggtttgaccagcctgccgtcgtcaccaacgccctgggcaacacgacctgctacggctacgacctccggggccgcaacacggcgcaatggggaacggggacccagcccctgctcttcggctatgatgaagcggacaggatgataagcctcaccacgttccgggaggacgcgggcgacatcaccgccgaccccacgggacgcacggacggggacgtcactacgtggagctacgatgacgccacgggcctgctcatccgcaaaacctgggcggacggcacccatgaagacaccgcctacaatgccctgaacttcaaatccacgctcacggacgcgcggggggtggtcaccacctggggctacaacctgaaaaagggggtcaacaactccgtctcctacagcgactccacgcccggtatccagtacgcctacaactacctcaaccagctgacccaggtcacggacgcctccggctcgcgcgtcctcacgtacaccccctgcaacgaaccggacaccgacagcatcaccatcggagggagctcttaccagctccaggaacactacgacacttacggacgctcctccggctataccctgaaacagggaaccggtgtcctccaggaagccagccagggctatgaagccgacggaaggctggccagcgccggaatcaggcacgggggaacggagcaacgcttcgcctacggctacctggcgggaagcagcctgctctccagccttgcgatgcccgacggcatcatcagagaacttgcctatgaacagcgccgcaacctggtcacggcaatcaactgccgcctgggggaaaccgtgttcgtctcccggacccagagctgcgatgccctgggacgcccggtcacccgcacccagcagcgtggaacggaacccgcccgcagcgacagcttcagctacaacggcagaaacgaactcaccgccgccaccctgggcgccgacccctacggctacagctacgacaacatcggcaaccgcaagacggcacgggaaccggccggagaactcgcctacgcggccaacgggctcaaccagtacaccggcattgaagaaagcggggaagcgccttttgtgccgacgtacgacgcctcgggcaaccagaccctcatcaagacgtcaacgggcgtgtggaccgtggtctacaacgcggccaaccgcgcggtgagcttcaccagccgggacggcgcgacagtcgtggaatgcggctacgactatcagggacgaaggtacatgaagaaagtcacccaaaatggaacggtcaccagccatgaacgctacctgtaccgaggctatttgcagatagccgccctggacatgctcaacagccggaacgtgctccggacactgttgtgggatcctctggaaccgatggccacccgccccctggccctcgtgcagggcgcttccctgtactgctatggaacggacttcaacaagaatgtgtcggaggtgttcgacgcacagggaacgatcgcagcggcttacgattactccccctatggggccgtgaccggtacgggcagcctcggccagcccgtccagtggtccggcgagatgcacgacgaagaacccaccctggtctattacaattaccgcttttacaaccccaaagacggcaggtggatcaatcgcgaccccattgctgaacagggaggatggaatttgtacgggtttgttagaaattctccatatatttttaatgacttaaatggaaatgacagatacatttcgcagattttacctgaccaattatccgacatgacatttaccttgcatataggtgtagctgttgatctttgggagaagaacaaagacgggaaatggtgtaaagtaggagttaagacgtttgattatggtttgaatccagcagacagggaaacagcgaaattagccgtgaagtggtcaaaaacaggaaatgaactaattcttcttttattagttggattatatatagtcaatacaatacgtggaacaattattcttggtagaggttatatagaatcttcagatggcctcaatttaactaatccagaaaccataccctcttcccctattgaagatataaatatgcttagaggaattcagcaagatataaaatcaccgcctccatataatatattaaaaaacaattgtgcagattggtcttatagagctatttggtatggaagagataaaacagtacattaatttacaaatgagaaaaatgttagaaatttttgaaaaaataataaaatttgatatattttttcaagaaaaagaattcaaaaaaagcaaatcgatattcagttatattgtttttatattcctgagtgtgggatcttatatatccatttttccagaaagattagttataaatacaaatttattatcaaatccaaagacaatattatttatactactaatttatatttcatatattacatcgtttttcaattggttttactgcatcaaaaaatcaatatcattattcatcataatctattttataccgacatatgtgatattttttatatattggtatatttatcaaaaatccatccacaatttggccacaagcatgatgtttccataataattatgatgtaaaatacgaaaacaaatcggcattatttactttagtcttgtttcgttgatctttccgattttttatcggagaaatttgctaaatatcaatatctaagatattctgaaaatcttgcgccaagactattctacataattccgaaaataattaacattaaacaaatgacatcatgaattatatgctatatttcttaattagtattatatgtataaattattctttaggaaatattcaagaaataaaaaatattcctgaagtccaagtaaaatatagcgatctaaaattttatcaaaatacatcagaaattacaatagatattacagattcagaaaagagtcgaaaaatgtttagtcttggaaaagaaatcatacttttcaaccaccaagagcaagttccatgtaatgctattggttcattttcttttctattttctgaagatggcagtataggtcgagtgaagttattttttaaaacagaattggaaaaagtattaaatggaactttaactgtattaacatcacaaaaaacagttccattaaaagaaaaaataataaaaattaaaaaagatgaagaatttaatttagatggaactttagtaaaaataacatcagtaaaaaaatcaaaagatggctacaacatttctttttcttttaaagattcaattggaattgctaaatttgaatttaaatcactagatggcgtgcaactcaaatcagaacaagaacgtttgataagttttgggttagatggaacacaagtatcttcatattatgtatttactacaaaagaaagcaaacaattagaattaattattacgccttataaatggattgaaataaaatgcctccatattcctttattcattaatctacccattttaaataaataaaagatactgttgtgggatcctctggaaccggtggccacccgccccctggccctcgtgcagggcgcttccctgtactgctacggcgtggacttcaacaagaatgtgtcggaggtgttcgacgcacagggaacgatcgcggcggcttacgattactccccctatggggccgtgaccggtacgggcagcctcggccagcccgtccagtggtccggcgagatgcacgacgaagaacccgccctggtctattacaattaccgcttttacaaccccaaagacggcaggtggatcaatcgcgacccattgctgaacagggggggttaaatttatactgctttttaatcaattatcctccatcaatagattatttgggaaaaattgcaatcgttctcgttattcctttaacaatcactgctgcggaagctacagcgtatgctgcaattgcagcagctggaatttgtttatcaaacagttactgtagcaaacttgcaacagcagcttttgttgctcctattcttgctgctgtcgctacagctaaagccttttcttctacaatatgtagtataagatgtcgatttggaaatcatggagctcatcatagttttcgagccaataggataggcataccttcatcaataagatgttggaagcgtcatttgcaatcaaattgttggatttcaggtgcatcaggatcaaatttcggaactattagaataccttatggagattgttataaaaatagaaatggcaatcctccgggaagatggtctagagttataataacgcaccctttttgatcaatgaatattaattataaatttaaaaagcattttatatatatattaagagaatacaaaagaaaaacatataatgaattattaaaacatgaatacccaataactgatctcgtaactattgaaaaagatacattaagtatagaaataattcttcttgaaaaatatagagatcatctcctattagggttagacgttactttgcttggatcgaaaaaaatatgttgtaaaaattcaattagaagaacttttactgtatataataaataggtccaatacaatttaaaaaggaaatttctgaagaaaaaaagtaataaatagcattgttcaagagccaggaactggttaataaaggtagtctgcttctgtacctccttcatattttggtctcttgcttgcagtgtgtaagaggctcttcaaaattaccctgtttaccctgtgcgatatcattcaactcacacaaattcaatgtattgaatgacacaaagtaaaaaatgcgcaccctgtcttgccctgtatcccaccacgtagcggtccattttatcaccacaaaataaactgattaagaatatttccgcactctgttctaccctgtcacggaacgggcaatggtgtacacgttcctccgtccgcctccttcctttcgtacctgcacgcgatccggacacatctctgccagtttggataactttccgcccagtttagccgcgttcctggccagaagattgaatgctctcattttgtcagcaggaagattagctcttccacggtcataaatacccgtggaagtggcgtccttcctgtagatctgtttggcatcttccggagttccgcagcgtgcggcctggtcaatcagttccagcaactgcatttccgggctgatgcccagaacagccgtggctagtgtcttgttcatgtatgctctgcatcggtgacgtcccgtaggttcctgcaaatgctccggcgcccggtaatggtcaatgaaccacgccagagcgggcaactcccttgccagggcctcatccacggcatccttttcatcttccgtcccattcggaggcgcctcatgataaccgctcagccagaaagccgcatattttatctgtatcgcctccctccatcggaaaagccgtcaggctctctccggatccgtgttgagcaactgcaccaccgcccaggacaacgccatcgggaaggcatccttccctttgccttaaatggagaccactccggcatacaggatattcttgctccggctcatgacgttccaccgctccgcctccttcacgttcttcatgatatcatccagaagaatcaccgggtaatgttccatgccgccgttaaacccttcacttcccggttttgtgaaatacttttccccggccatgaccagatgatgaaccctggtgcgggccgtgcgccttttcaggcacgcctgaatacgctgtcttgtcccctgcatccaggctataaaggaaggaaattggtcaaagtcctccgggtcatccagcaaaccacgcaagaaggccagggctgtcgagcaatccccttcctttccctctacccacggcccggacggctcggaaatcgccgtctgaaataacggggaagcccgcttcaataatatccacgcccagcgtttccagctgcatggccacctgtattttctgctccacgttcatcgccgcgccggggcactgttccccgtctctcagcgtcgtatcaaaaatatgtatttgttctttcatttacagtaaaaatgttaagaggtcgttccttcgggaactgcgcacggaaaacgttcctgttacggaatcattcctttggtgcaaatcaagacagccgtttacttccctcgcgccggaacggctcaccggcgcatatcaagatatcttcacggacttaccgtccgagaagcagcaacagacgaccttgcagaaacagggtattcatcttgcttgtttttactataaatccaccctgaatggggaacgggacagacaatgctctttaaaacctgctctgtcaagacacctcaaatacatatgacattgttagagttgtctcatccattgaaattttgaaagagagtgccttccttcacaaaaaaactgcctgttaaacaaggttataatgtacgaataaacatagaattccaataactggaactcattcctgaaatcagttccagatgagaaaattatgtaaccccaaactggataatacgcctaataacaatctattaagattaccataggataaggtttgacacattattcacaactcaacggcctattgctattcacagcaataggccgttttctacatttcccggtgggaacgtatttcctgaatggaaatggacagggaggcgcggccgcggtacacgttgcggtcaatcgtgaaagcgatatcccagggaggattgggaagctcccgttccgctccgttgaagaaaatagcgtcacgctccacgatgccctggcgcatgaaaagcttcagatgattggttcccacgcgcttgggcggttccgtgggaaaaacgtcggaactcataaagacaggctgtggattggagttgccgaaaggttccagcttttcatagctgtccagcaaatccagcgtcaacgcctggaaggacacttccatgtctatgttgagcacggggctgcgctgttcctccgtcgtggtttcagacacataacggttgaatgcccggcggaaatcgtccatacgggattcttcaatcaccagccccgccgccatgtcatggccgccgccggaaaccagcgtatccgcgcaatggtggatggcctgcaccagggacacgccgggaatggaacggccggagcccttccccacgccgctttcgtcaaaggcgatgacgaaggtcggcttgtggtaccgcctcatcagctgggaggctacaatgcccaccacgccgggatgccacgcgcgggaacccagcacaatgacgttgtccctctccggatcaaaggagttatgaagcatttccaccgcatccgtccggatggcctcctcttcctcctgccgcttgcggttgtgggaatccagcatttgggcaagctgcacggccctcctggcatccatggtcagcaggagttccaacgcatccatgggggaatccatgcgcccggcggcattgatgcgcgggcctatcctgaaccccacgtgggcggcgttcaggaagcccgcgtggttgacggagtcggaagggcggatgcccgctatttccgtcagggttttgaggcccgtatggcggctgtgcgccagcctgcccaggccgtggcgaaccagaatcctgttttccgccaccaggggaacaatgtccgccacggttgccacggccaccaggtccagataaagtttcaggtcaaaggttttcagtttcctctccttcaggagggcatgcgccagcttgaagactacgcccgcgctgcacaggtaagtatatgggctgttttcctcaattttggcattgaccaccgccgctgcatccggacgccccaaagggcccgcctcatggtggtccagaatgatgacgtctatccccaggctgttaagcatgtccacctccttcacggaggaagtgccgcagtccaccgtaataagcagactgggagggtccgcacattcgcaaaggcagcgcttgatgccggcctcgctgagtccgtagccttcccgggaacggacgggaataaaatactggggatccaggtcataagccatcaaaatggcccggagaagcgccacggaggtgacaccgtccacatcatagtccccataaatacacacggtttccccttcatccacggcccggaaaatgcggtccacggcagccctcatttcccccatcaggaaagggtcgctcaggtgggaaagcctggggtccagaaagagttccgtttccattcccccggtgaagccgcgctgcagcaggagctgcttgaccagcaggggcagttccgcaggaaacgctttcaagaccggatcatcctccttcacggaagggcgtagagtccaatgaaaacccggcgtcatggcagtattttagccccgcatccaacagggtcaaggttgtttccgcaacagacggccaaagcggagaaaagaagcgtccgcttccgtttccggaaacagtccgcacgccgcgcgcccggccctttcaaaaaaaactccgcccggttcgttccggacggagttcggcgtaaggcgccagcgcctgagacggttatttccgggaggaaaaaatgacttcattaatgatcgcctccggctggggagccttataggtcaggcgcacggcagaagttccggcagggatggcaaattcagagacaccggggccggcgttccgtttgccgaccggcgtccaggcgccttctccgcggcgggcctggatggcgaaggcggcggatcccaccacgattactttggtagccttgggattgtccagattgggaacgactatgtccagcggcttgtcggcacggtaaaccgttttcaggtttctgtcgctcagggaaaccaggctggtgccggggtccgcgggaggaacgtcaaatttgaacatgttcagaacaatatcctgctccctgccgcttttattaaccagcttcatccccttgattcccttgggaagctggttgcccctggcaatgaagtttttgccctgtttgtccagcttctggactacgggcttggaagaaccttccacgtccagcaccacttccgcccaggagttgacgtcatcccgttccaggttgacttccagccaggtagcgtccgtggggccatccagctgcagggaaataaattccccgggtttcatcttatgcgtttccatcacgcggttgatccgcacgattttgtcggatttctgcacggaaacgccctccagccccgacacattggaggaagccatagcggaaggaggcgtgttgacggctatttcccgcacggcagtccagacagaccggccgttgcctgtttttttcggttcaatgacgcggtagcgtacggcacggagcaaaaccggcttgggagccttccagaccacctgcatgccggaagtttccggccccagcggtttccaggtttcgaggtcgcgggagccttccagctgccctttttctacatagtcgccgtccttgtcattgcggcccatcagcacttccacgctccgcacggggatgggcattccgtagtccacgccataccagtcgcccggttggccgtaggcgccggagtgccagaaggagccgcgatccccgtcacagaagagttccgccttatccatgctgccccccttgaccaggggcttgggagaaagggccggcgcgccggcaatggccggaaaaacttttttggagacaatatccgccagttcattcacggcgggggccatcacacgggaaccggtctttaccgcagaacggtacaactgtccttcctggttgtggcggcgggaaattccatccatggccgccagagcctgcgtagcctgcaccagccgggtcgcggcttctctggcgttgttttcctccagcgccgctacagcgtgctgaccggcatgccccagttgctcaaaggcatccacccacgcgcctatttccttcatcagccgcggattgttcgccctggcacggatgacgggcgcagcggcggccatacgggcaaattcctttttgagcagggccgtatccttcttctcaatcttgccttcccgggcggcttccagcacgcgcttgactacgggctctatttccacggattcctcacgccggtagccgtgaccgttagggccctggtcggagttgtggttcacaaaaacctgcatggcttccgccgctttcgggaacaggcgcctgactccttccttccaggcctcatcagacttgaacccgttgatgttccaggagtagtccgcaaggccgaagagggagaccttggaggcctccggcttatccatggggttggagacgaaaccgcccatggattccttcgctcccggttccgaggcaaggccatacacgcggcccatgcagaggttggaacggcagtagtccgtgacggggaagttccaccagacgtaggaagggcgcttgattctcctgttcacccattgctggccttccagcgtaatgtcatggcaaacggagttccccgtccacatgacgtggatggaggggtccagacggtcccccagaatgtccagataggttcccggcttgggatcggcccagccgcggttgtactccgtggggcacatgaccaggggggtgacgtccttcttcaccttgacaaattcgtcattgattttgttcagcagaagggcctgcatgtccccgcgcttgccttcgccgaagatatcgtcaaaaaacacggcaaaggaacggacgcccagcttgtacatcatctcaaactttttgatgacgttgttcatgtcttcttccgtccacttgatatctttgccaggatggatggcccacacaaaatccacgtggttttcctttgccaccttcaccagttccctgatctgggcggcctggtccgcgggataggggtccctccagtggggggaagagtggtagggatcgtccttcggcccgtagatgtatgtgttcatcttgttctggccgtaaaagcgcagctggctcaaacgggcttcatggctccagggggtgccgtaaaaaccttccaccgttccgcggaattcgatgtccggccagtctatgatttccccaacgggcaaaatcacgccttccccgccggccttcgttcccagctgccgcagcgtctgcatggcgtaaaacgccccccgttcgtcatgggctcctatgcccacctttccctgcggagaaatcaccagtttgtaggctccggatttctccggaactccctccagcagcttgctgccgcccgccttggcggaacgtatggtcacggacggcttcccggagaaagcaaccgtctgggtggtaaatttggactgttggggagacggatatacggcaggagtcgccgccagggcggaaccggccagaaaggccgccacgctcaagccacattggagaagttgaaaaccattcatgatgatgcgcgataatggaaccagaaaacactttccacctcaagaaaaaacctctctccgccatcagaccgtcgtcaccggtggaagaaagcccccggagcccgcacgggaaccccggccgggctggacgccaagggcgccgcatcccccttcccctgccaggagttcaccacaacgctgaaaaacaaaaaaagagccgtgcggactccctgaaaagtcagcgtcatcctgctttagaagacaaatttgaccattgcatcacttgaagggaaggttcatcatgcggaacatgctccggtgcatgttgattccttttctgtgtcttctgggcctgttctgttctcttcaggcccaggatgccccaatattgaaaatcgcggctctgcaccccgttctgggagacatggcccgctccattggcggcagccgcgtgcaggtggcggacctgctgcgccccaacggcaacctgcacagttttgaacccgcgccgcaggatattgccgccgcgggacaggcgagcctggtgctggcctccggcaaaaacctggagccgtaccttcccaaattaaaggacgccctgggaggcaatgtgcaaattctggatcttggagcctccgttccggacgttcccgtggaggaagacaccgcagaccatgaccatgaacacgacggagactgctgcgcccacggccccaacgacccccactggtggcacaccccggccaatatgaaacgcgccgcccgcaccctggccgcaatgctcacgcggctggacccggcccatgaacaggactataaagccggcctggcccggtggaacagaaagatggaccagctttcctcctgggccagaaaggagcttgcggacattccggaaaaggaccgcgtcctggttacggggcatgcggccatgaaccatttctgccgggaattcggcttccgcagcatcagcatccagggaataagccgtgaagacgaaggcaactccgcccagctggcctccacgctgaacaagctgaggtccgccggggtcaaggccctgttcccggaatactcctccaaccccaagagccttacggaaatcgccaaatccctgaacatccccgttgccaggccaatcaataccgacgggctggcctctgaaggccacacgttcgaatccatgttcagacaaaacacaggcatcatcaaggaagccctttccccgtctcccagaccatgaccagcactcccctgcggcagttttttcccactctgggagtcgtcatcctgctgggattcttcctttacaacatgacggcgccttctccgggaacacagggaacggcgcatgccgcccctgcggcgccaaccacggatgttcccacggtcatcacggtcagatgcgcccaccgtccggaagccctttccatatcctgcggcggccgccttctctggcagccagaaacgcccgggctgcatgaagaaacggaatgcggcctgccgttgaaagacggctccgtgatcctcaccgtttccgcccgctggccggaaaacacgccggacacccccgtcacgctggaactggaaccggaggggaaacctaccgtctccgccacccgctggtccttcggcccttccctgaacgacagctactccttctcatggaaatgaacagcccagcccctccctgcacccaggaccacatctgctggggcgcgcacgccagccacccggaccgccaccgcctggaagtggacagcctcagcgtttattatggtagtcttcttgcgctcaacggcatcagcttttccatcacctgcggacacacgctggctctgatgggtcccaacggcgcaggaaaatccacgctgatcaaggctctggccgggctgatccgccccgattccggaaaaatcctgtggaacggacgccccctgcacgacacgccgggagaaatagcctacctgccccaacgttccgacgttgactggtccttccccatcaccgtccgcgcgctggtggaaatggggcgttatccttccctgggcctgtggaaaaaattcgggaggcatgaccgggatattgtggaaaagtcccttcacgctctcggtatggaatccctggcggaccgccagatttcagaactttccggcggccagcagcaacgggcctttctggcgcgggctctggcgcaggaggcccatgtcctcctgctggacgaacccttcacaggactggacgctcccgccagccagtccctgggaaggctgctggattccctggcggcggaagggcgtctggtcatcgcctcccatcacgacttgaatacggcggcggatatcttcgacaccatcctgctgatgaaccgggagctggccgctttcggccccccgaaggaagtgctttcccccgcacgcatccgggagatatacggaatggacccccaaccggaaacccaagcttcatgatggatgattttctccaattcctccgcgaacccatcgcgcagcggtccctgctggcctgcgtcatgatcggcttcgccaacggcttcgtcagcgggctggtaatcctgaaaaaatccgccctccaaatcggcacgctttcctgcgccctgctgccgggcattgcggtggcggtgctcctcttcggccttacccgctggagcctgctgacgggggctgtggtggccgccctgctggtgggtctgggttccctcttcgtctcccgtacatcccggctgaaccaggacaccgccctttccatcctgcataccacggctttcgctgcgggcttcatcgtgctggtcaggctgggcctgcagcagaaaattgacgactggctgtttggctccatcatgagcctgtccgactccgacctgtggatcgccttcgccatcagctccgtcagcgtcctgatcctgctgctcttccgccgccccatcctgatctgcctctttgacccggacatcgccaccacgctgggaatcccctcccgcctcatcagctacggcattttcaccctgatcattctggtgctcgtttcctccctgcaggccgtgggagcgttcctgacgctggggctgcttgtcggccccgccgccacggtgtacctgcttaccaacaagccgtcccatctcttctgggggggaggaatcatcggagggctgggctccctgctggctttttacctgtccttccccctgggctggcatctgggcgccaccatcattctggttctgggcgtcattttttgcacagcctatttgtattcatcacggtgcggacgtttgaaacaacgcgggaagaattcttctcaagtacaataacaaagcccattttcatgacaatccatgacacgcagactactagtccgccacagggagcgccattataatgcgggttgtgaaaaaatgtgagatatgctctgcaccggcaacggtgttcctgacacagatcatcaacgggaagtccaccaaattctgcctttgcgccaaatgcgcccaggagcggggtctgctggatccagatgccttcgatctggcagagaaactgttcccgaaccttcagggccaattcggcaaggaaggcgcggcggggcccgccgctcccattccggccctgcaatccctgcccctcacaagctgtccgatctgctccttcacccttcaggattacaaaaacgtaggacgcctgggctgcagtgaatgctacaacgtctttgaagaagaaatcctccctcttcttacccagatccagcctgattcccaccatcacgggaaaacgccggaacgggccgaaaaacgcgaaacggaaacccataccatcagcgatctggaacaacagctttccctggcagtggcaagagaggattatgaacgcgccgccaaactccgcgatcaaatcaaacaattgcgcacgccgaccaattaacatacatgctctttgacgacttactcaacaaccccgccaaatggatggtggaatcaagggatgagcacgacatcgtcctcacctcccgcatccgcctggcgcgcaacctgaccgccaccccctttcccggctgggccacacgccagcagagggaggaaacgctgaagctcacttccggagaagcgcgccaaatccccgtcatgaagggaggctattatgcggagctctccggacttacccagcagcagaaacagttgctggtggaacgccacctcatttcccgggaactggcggcgcgttcggaaggctgcgccgtcctcatctcccgcagccagaatgccagcatcctctttaatgaggaagaccatctgcgcctgcagtatatcctgcccggcatccagcttaaaaaagcatggggggccatctccaaaatagactccgaactggaggccaggctcccatacgcctacaatacgcggctgggctacattaccgcctgtcccaccaacctgggcacgggcatgagggcctccgtgatgatgcatctgccaggcctcgtcatctccgaacagatgcagcaggtcgttcaggcggccgcgcagctcaacattaccgtccgcggcctttacggggaagggacggaagccaccggtaaccttttccagatatccaaccagtccacgctgggggacagtgaagaccagattgtggaacgcatgacccgcttcacctccgacctggcccatcaggaatggaacgcacgcaggcggctgctccagtcatcttccctgcaggtgaaggaccgcgtttcccgcgcctacggccttctgaccaatgccactctgctttccacgcaggaggcgctggccctgctctccttcctccggatgggagcgtctctggacatcttttcccaccaggcattaaaaaacgtcaataaaaccatcatgaacatccagccggcccatctggcccgcctgtccaccacggaccaaaccactccggaacacagggaccagatccgcgctgatattattcggaaagaactttccggcaactaatgcaaccaaacaatttttttgaccatccatgaataattttacgcctagggcgcaacaagtgctggcgcatgcgcgccgggaagcggaccgcttcaatcatcattacataggaaccgaacaccttctgctcggcctgctcaagctgggcaagggcgtggccgtcaccatcctggaaaatctgggcgtggagcttaccgccgtgcgcaaacaggtggaggaacaaataggccggggcacggaaccccaggcggagggcaacatcccgtacacccccagggtgcgcaaagtcctggcaatggcaaacagggaagcccaggaactcaaccacacgtatgtgggcacggaacacctgctcctgggcctcatccgtgacggcgacggcgtggccggacagattctgcgccacttcggcgtggatttggaacaagcgcggcgcgaattgctggacgtgctgacccccaaataccagatggatgcggatgaagacaacatcatcccggacgacgatgacgacgaggaggaaaatgaatcccccgccatcccgacggacgagccttcctccccctcctactccaggcagcagaaatccaagacacccgcgctccaggcctttggccgggacatgacccagctggcccgggacggcaagctggatcccgtcatcggccgcgcctcggaaattgagcgcgtcatccagattctgtgccggaggaacaaaaacaaccccgtcctgctcggtgaagccggggtgggcaaaaccgccatcgtggaagggctggcccaggaaatagcccagggccatgttccggagctcctgcgcagcaagagggtcatctccctggatctggcgctgatggtggccggcaccaaataccgcggccagtttgaagaacggctcaaggccgtgatggatgaaatacgccgggaaggcaacgtcatccttttcattgacgaactgcacaccatcgtgggcgccggctccgcggaaggctccatggacgcctccaacatcatcaagcccgccctctcccggggtgagctccaggccataggcgccaccacgctcaacgaatacaggaaacacattgagaaggatgccgccctggaacgccgcttccagcaggtgcaggtaggggaaccctccgtggaggacaccattcagattcttgccggcatccagcccaagtatgaggaacatcacaaggtgcattatacgaaggaagccgttgaagccgcagccaggctctcccaccgctatctgacgggccggttcctgccggacaaggccatcgacatcctggatgaagcaggggcgcgcaagcgcgtctcccagatgacccgcccggaccacatcagcgacatggaaacccgcattgcggaaatcaaggaacgcaaggacaaggctgtggaaacccagctttttgaggaagcagcctgcctgcgcgacgaggaaaaacaagccagggcggaacttcagaacatgctggaaacctggcgcaattcctatgagaccaattacgttcccgtgacggatgaagacgtgatgagcgtgctcgccaaatggacgggcatcccgctggcccggatggaggaaaaggaaaccgccaaacttctgcggatggaagaagagttaaaaagcaaagtcatcggccaggacgaggcggcctccgccatcgcccgcgccctgcggcgcagccgcgcggacatcaaggaccctcgccgcccgatcggctcattcctcttcctgggccccaccggcgtgggtaaaacctatctggcccgcaatctggcggaaatcatgttcggcaccgcggacgccctgattcaggtggacatgagcgagtacatggaaaaacacaccacgtcccgtctcatcggttctcctcccggctacgtaggccatgacgaaggcggccagctcacggaagccgtccggcgcaggccctactccgtcatcctctttgatgaagtggaaaaggcccatccggacgtcatgaacctgcttctccagattctggaagaaggaagcgtgacggactccctgggacgcaagatcaacttccgcaacaccatcatcatcctgacctccaacgtgggggccgcctccgccaagcggcagagcgccatgggcttcggggccatggccgccgacaacgcggactacgccgccatgaagggaaagattctggaagaagcgcgcaggcaattccgcccggaattcctgaaccgctttgatgacatttccgtcttccgcatgctggaacgggatgacctggaacgcatcgtgcatctggaagcggacaagctcatctcccgtctcaagaccaagaatatcacgctggccctgagcccggaagccctgagcctgatcatcaagaacggctacgacccgcagtacggcgcacgcccgatgcgccgcaccatcgaacgcctgctggaagacccgctggcggaatccctgctgaggggagacgtgaaacccggcgataaaattgaagccgtggaaacggacggaacggagacgctcaccttcctgcacatcaaggataaaaccccggcaaagcccaaaacgccgcgcaaaagggctccacggaagcccaaggcggaataaaagctttccggtttttcaaccgaggcccctgcatgctggcatgcaggggctttttctttgacggattacgcaaatatccgtttttcgctgaaagaaccatttaccagtctgtgatatattataaatatgaccttttacttctcaaaaattctattccttttcatgctgacaaatctgtttgtcttcgcagaagatatacagaaaaacagggagcgggaagcagcgcgttcagtaatcatgcggaccgttccgtccctggccaaagccccggaaaaactgcaattggaaattattgaaaaagaagacgggcacgatgtttttgaaacgaaggcctccggcggaatactgaatatccggggaagcagcggtacagccctctgccggggattctatgattttctgaagacaaaccgtctgggaatggtctcctgggataataaagatatccgctggccggcgcaactgccggacgccgcgccgcgccgcatcgtttcccctttccgcaaccactattacctcaatgtggtcacttatggctatacgatgccttactggacctgggaacgctgggaaaaagaaatagattggatggctctgcacggcatagatatgcctctggccctggttgccacggagggaatcgccatacgggtatggaaacggctgggactgacggagaaagaaatagaagaattctatacagggccggcacacctcccctggcagcggatggggaacatcgtcaatcatgacggccccctgcccgccagctggcacaaggaacaaatcgccctgcagcaccgtatcctgcacaggatgaaatccctgggcatgtccgccatttgtcccgctttttccggtttcgttccccggggaatcctccgcctttatccggaagcgaagcttcaccggctggggtggggaggctggcctcaaaaaaaccacgcccattttctttctccggaagacccccttttccttaaaataggacgcctgtacattcaggaatggcagaaggaattcggaagaaacacctattttcttgcggactccttcaatgaaatggaacttcctgaaaacaaaggaggcgccaaagcccgcaacaacatgctcagttccctcggagaacaaatttaccgctccatttcctccaccaacccggatgcggtatgggtcatgcagggatggatgttcggataccagcgcaatatctggaacgcagatactctgaaggctttgctcagcaaggttccggatgataagatgctccttctggacctggcggcggattacaacaagactttctggcgcaacggcatgaactgggacgtcttcaagggttttttcaataaaccgtgggtttacagcgtggttcccaacatgggcggcaaatgcgccatgaccggagtaatggatttttacgccaacggccacctggaagccttgaactcttcatccaggggacgcctctccggaatgggcatggccccggaagggatagaaaacaatgacgttatctacgaactggttacggacgccgcatggagggaccgccaggaggacgtggaacaatatctggaaaattattgccgtgcccgatacggaaattatccggacagcatgaaggaagcctggaatctgttccgccgcacagcctattccaacttaaaggaccatccccgtttcaactggcaaatgaaacccggcacccgcggctgttccgtaaacacaagcgaagattttctgaaaggcctctccctgttcgtcaacactcgcggcctggaacagtcccccctgttccgacaggatgccgttgagatgaccgcccattaccttggcatacgcatgaatgaagccatcctggccgctctggaagccctggatgaacaagacatggagaatacgaaaaaatgcatggaatatttccgcaaatacgcccttcgggcggattcccttctggaaggacaccccacctggaggctgtcgcgctggttatcatttgcccggtctcacggaacttctccggagggaaaaaacaagtatgaacaaaacgccagaaggctggtgaccagatgggggcctcccgtagacgactacgccgccaaaatatggagcggccttatcagggactactatctgccgcgctgggaacactttattcagagccgtctttccgataaaaatccggatatgggagcatgggaggaaaaatgggtccgttccactggcgtaagcgcggcgcacgcgcccggagatctggtcaacgcctgccgccaggctatccgggaggcgccccccctgccttcttccctgaaaagaaaagcagccggatcaattataggaaactggacctccgcgacggtatccacggaatggagttatctggactggcccgtttcttccgctgatcttgaaaaactccggggggtgcgcttcgtcttcacttccggcagccatgccctggaaatagacggcgtcgaactcctggaaaacggcaaagtaatcgcccgcgaccagcacgccggattggcaggcaagccttcccgcgggaatttctacaaactttcccttcccaagggaatccatgccaacaacggatgctccctcagagccagggtccgctccgtaggcggaaaatcctccaatgggaaactggaattgattaaagaatgaacggcttgaatttcattcgctttccggaaggagcctcatgaatccgtacccgtgccgtttcctgaccgaaccaggaaacggcacgcccggcgtccctcggaagccccgcacagaacaatcggacggaaagttacatttcgaaccggtgcaggttttccacatgggaatatcccatcttcctgagcgtttccagcgccttgtccgccctcttgcccgtacggcaatacagcagaatcacggcgtttttatccggaagaagctgcggagcccgttgttccacctcatctgccggaatattcaaggctccctccttatgtcccgtgcggtactcatccggagttcggacatccaccagcacaatagggcgcgccatgccgctttccggagacaccaccatggcggcgggaacaggggcgcgttccgcattcctgcctttcagccagacgaagagggctgtcagcccggtcaccatgaccacgtacaaaaccacgtttttcacgcggccacttcactaaaccgcggcgaagtaatcaagagaaaataccgcccagcccccgcacgcaggcgtcatctgccctccggcccgctccggcggccccgttccacgggaaaccaacgctccggatacagaaacaatacgcagaagcggtaagagaaaaaactttcccttaccctccatattcagaagagccggagaattgtccccctacccctcatcatcaatcaccacagcctgggaagcgaatccaaaagcggggcttccccattccactacatccccgggtttcaaatataccggaggcttcatccccatccccacgcctcccggagttccggtggaaaccacatctccgggccataaggtcatgaaccgggaaacataggcaatcaggcgcggaacaggccagatcaagccgtccgtattgccgctttggcgcacttccccgttcaccttcaattccaggggaatgccggctccgtccccaagttcatcagcggaaatgaacgtggggcccattggggcaaagctgtcataactctttcccttggtccactgtccgccatgttccagctggttggccctttccgaatagtcgcacatcagcgtatagccgctgatagcccgcgcggcctcctccggggaagcgtttttcagcacctccttaatcactacggccaattcaatctcataatccagcttgtcgcagccgggcggatacaaaacgacatcgctgcaggaagtaatggcggaaggcgatttcaggaaaacagccggctcctgtacggaatccccgtcaaactccttcgcatggtctgcatagctctttcccaggcacaccagcttggaaggggaacagggcagcgcggtatcaatcgtccattcagggtcaacagctttggcggcggtattatccagaaacgcggcaatgcgctttatttcctccccgcaggatcccgtttccccgcaaatgcaggcatccacctcggcaagcacggagtccgccgccaggtattctccgcggctttcgctccacagagccatgacgcgctccgcccggtcattcaggtaaaatctgatcttcacccttccatcctacaaagctcctccttttaggcaaagggaggttccgtcattctttgctccggcggttctcttccgccgcccggacgctctgtgaaagcatgcagcgcgtagggcttgcgttaccggagcaaaacattatcatgccaccgcttaacatcattaacctatgtccgatcaaatctatttttttgacactaccctgcgcgatggagaacaatgccccggagcatccatgaacctacgcgaaaagctggaagtggcgcggcaaatggaacggctgggcatggacgtgattgaagccggctttccctgcatctccgatggcgactttgaagccgtgcacaccatcgcccgcgaaatcaaaaaatgccgcatcgcagggctggcccgctgcgtgaaggcggatattgaagcggcggccagggccctggaacccgccggggaacgcgcccgcatccacatcttcctggcaaccagcaagctgcacatgcagttcaaattgaaaaaagcggaatccgaaattctgcgcatggcggcggaaggcgtatcctatgccaagcaattcgtgcaggatgtggaattttccccggaggacgcttcccgcacagacctggattttctgaccaaagtcgtggaaacagtcatcgacgccggcgccacgaccgtcaacattccggatactgtgggctacactactccggacgaattctaccgcatcatccgccacctgaaagaaaatgtgccgaacatcggcaaagccgtcatctccgtgcattgccacaatgaccttgggctggccgtagccaactccctggcagccgtccgcgccggagcccgccaggtggaaggaaccattaacggcatcggcgaacgcgccggaaacgtggctctggaagaagtcatcatggccctgcgcacccgcgccgggcaattcggagacgtcacggacaacatcaacacgaaggaaatcgtccgcacttcccgcatcgtggcccgcatgagcggcatgcaggtgcagcggtccaaagccatcgtgggggaaaacgctttcgcccactcttcaggcatccaccagcacggcatcctcaactgccgggaaacctatgaagtcatggacccgcaggcggtcggctggggcgccacggaactcccgctcaccaagcattccgggcgcgctgccgtcaaatccaggctggaacagctgggccatgtcctcacggaagaggaagtcaacaccgtctttgaacgcttcaagaaagtgggcgactccaaaaaattcgtttatgatgatgatctttccgccattgtggacgactccctgcatgcctccaccggcctatgggaactggacttcctgcaattcgtggcgggcagccacgcgcgtcccacggctacggtgggactgctcaaggaaggcaagaaatttgaagacagctctacaggcaacggcgccgtggatgccgtcatcaaggctattgaacgcatcactaagcgcaaaggcacgctgaaaggctacagcgtcaacgccgcttccgaagggaaggacgctctgggagaagtcacggttcatgtggacttcgggcagcccaagcccattgtgggcaagggagcctccacagacgtcattgaggcctccgcccgcgcctacctgaacgcggtcaaccgctctatccgcatggaaaacatgccccggcccaacaatctggattctggaaccatctaacacggaaagcgccccgttcgcccgaacggggcgcgactctgcccggcagcctatcatcctctacagggcttgcatttccattgctcccatgtcataaggatcaagactcttataccgcaccaccccatgaaagcgacaccactccttctctgcctggcgtgcagcgcgctggccgcaccgccggcaaaaaaacagccggaacccgccgaaccgctgcccgccctggaaaaaaacaccattgccattgacggacatccggaaagcgtggcggcggatgccgagggcaatatctatttcacctgcatcggctccaggctcacgcctacggaaaaagacaaggacggctatctgggcgtcattccgcacggttccacagagccgaaaaaaatcacggacgtagataccctggacgcgccgaaggggttactgtatcaggacggctttctttactgcacagacgtggacatggtcttcaagataaacgccaagaccggcgctattgaaggatacgtggacttgtccccgtcccgcatgaaattcctcaatgacctggcgttcatcaatggcaggctcatggtttcctccacggataccaaccagattttctatgtggacacgaataccagctcttatggagaactggtgaccaaacagcccatctacaagccgaacggcctggcctgggatccggaaagaaaggtcatttacctctgcgaatacgcaacggatgaaaagggcaaacccagcggacgcctgctctccatcaaccccgtttcccgggaggtcacggaactttccaaggaacggggacagtacgatgggctggtgtaccgtgacaacgccctatactacagcgactggtccaaagataaaaaaccggaagctgtccgcaggctggatctgaagacggggcgttccgccccggtagctaccggcccagttgaaggagcggcggactttatcctgtatgactccatgatggtggttccgggcatgacggaaaagaaaatccacatcatgcccattggcggaaaaaaataaacccggctgttccgcttttattccccttatccgggccgccgcggtatttcctgcgctggcggtctttttcaatttacggcttgaagtacatctggagatgcgcttagttaatggaaatatgaacaagatttccgaccaaatcatggaggggatgaaaaccgccatgaaagcaaaagacaccgttaccctcaataccctgcgcgccctcaagacggccctcacgaacacggccatcgccaagggaggtctgggaaccctgctggaagaagcggaagaactggccgtagtccgcaagcaaatcaagcagcgtgaggactctgcggagcaattccgctccgccggacgcccggaactggcggaaaaggaagaagctgaaatcgccgtcctcaaacagttcatgcccgcggaactcacagcagaagaaacggcagccattctggaaaccgtgatgaaggaaacgggagcctctaccaaaaaagacatggggcaggtcatgaaactcatgcaggaacgcacggccggcagagtcaacggcaaggagctggcccgcatggtgtcagccagactgtcatgaaatgctgcgccgccatcatcgttgcggccgggtcctcccggcgcgccggatttgacaagctgctggcccccctgcacggagtcaaggtgctggaacgcagcatccgcgcctttgccagctgccgggaaatcacggaaatcgtagtcgtctgcccggaagaacgttttcatgccattaacggcgcagacctggaaacggaaatacccgttacccgtgtggacggaggggcggaacgacatgaatccgtgcagaacggactggcagccctgctttataccccggaattcgtggccgtgcacgatggagcccgcccgctcattacggtggagcaaatttcccgttgcattcaaaccgccagggaatatggggcggccgcttccgcacatcccgtaacggataccctgaagcgtgcggataaagaacgctttacgattccggaacaggtggaacgggacggcctgtggtgcatggaaaccccgcaggtcttccaataccctcttctgctggacgcttatgtggaagtcacggaacggaatatccaggtaacggatgaagtcaccgccctgcagctcatcggccaccctacgcgcctggtgcataatcatgagcccaatcccaaaatcacatggccggaagacatttcccgcgctgaaatgctaatggaactcaagcacctccgcaatgactcatgaccggccttctgtgtaagaatccccgcatcgttctcattctgggaacagggtatctgggaaaagccctggcggaaagcctgcggaaagcgggacatacggccctgacggcggatattgacccgcaaaaagccatttacgaagccgacgttgcagaccgggcctccatgcaggggctggccgcccgcatcccctccccccagatcatcgtcatgtgcgccagcacgaagggaggcggagaggaagcctaccgcaacctttacgccaatgggacgcggaacacgctggaagcctttcccggaacgccggtcatcttctgttccagtacagccgtctatggaatcacggacggacgctggattacggaggaacacaacgtctatccctcctccggaaaaaacgggcttcttattcaggcggaacaggcggtcctggcagcgggacgcacggtcgtccggctgggagccctgtacgggccgggccgctgcgttctcgtctcccagtacgtcacgaaggggacggccctccccggagccatggacagatggctcaattacatccaccgggacgacgccgctgccgccctgcacctgctctgcaccctgcgggaaccgcctgtcggcatttacaacctgacggaccgcacccccatgcaaatgggagaaatatactcctacctttccaatttgctggggaaacccgctccgcagcctgaaccgctcccggcggaagcgcgccggggcttctccaaccagaggatttcctgctcccgccttatggccctgggctgggaaccgctctacccaagctttgcggacggtgtgcacaatgtgctggaggcactggaagagtaattttacccccatccttttccacgctgaccggccctttccggacattccataaataagaagaggcatcccttctgaacgcatctcgtgaggcaggcacatgccggaaaaaaatccagccgacggcccctcctgtctttgactctcccctttcttgacttgccgggcgcgaacaggcaaaatcccgcgcgcaatgcgtatcatcacaggtcttcaacccagcggcaagctgcatgtcggcaactacttcggagccatggaaccggctgtccgcatgcaggaaagcggggaatctttctacttcctggcggactaccacgccatgagcaccgttcacgacgcgaacgcgctgagggaaaactgcagcaacctcgctacggactttctggccgtgggcctggatcccgaaaaatgcgtctttttccgccagtccgctgtgccggaagtcaatgaactggcctggatactcagcaccgtctgtccgatgggcctgctggaacgctgtcattcctacaaagataaaatcgccaagggattctcccccagcaacgccctgttcacctaccccgtgctgatggctgccgacatcctgatgtatgactccgacctggtgcccgtaggcaaggaccagaaacagcatctggaagtcacacgcgacctggcgggcaaaatgaacgaacaattcggagaaggcacctgcaaacttccggatgcgctcattgcggaaagcacagccattgtcccggggctggacgggcagaaaatgagtaaaagctataataacacgctccctattttcggagaggaaaaagctgtccgtaaactcatcatgagaatccccacggattccacccccgtggaagatcccaaaccgacggaaggttccgtcatcctgcagctttacaaactctttgcctccgcgcagggttatgaagatatggtgcgcggtttccagaacgggggatgcggctatggagacttcaaaaagcgcctctttgacgcttactgggaatacttccggcccgcgcgcgaacgcagggcggaactggaagccaatcaggactatgtgcgccggacgctggaagaaggcgcccgcaaggcgcgcgagacggcctctgtagtgctggacagggtgcgccgcgccgtggggctggcctgaaacggaataaaacggaacacccgggaaagccggggcagcacacgtttttttgtggcatggaaaagtacggaatgttatacagaaagatatgaagaatattctggtagctattgatttctccaacgccacggacgccgtcatccaccaaatcggcaaactggcctgccccaacgacagcatcatccatttgctccacattgtggaacccagcatttgctatgaagtctccggcgttctgccggatgaagtgcccgttcccgtgatggaccagacggaagaaaacgaagtcatttccatcgccaaaaaccatttgaaacagacggcggaaaaactctcccggctgacggacgccacgatcatccaggcggtggaagatgaatttgaaatcagcgaagcagtcattaattatgctgaaaaacaccacatcgacatgatcgtggtgggcaagcataaccacggcttcctctccaccgtctttctgggcagcgtcgcaagctccgtgatgcggaaatcccccgtgcccgttctggtagtgcccgtcaccagggaagaacagtaaaaaccgccatctgcgccagctccgtcccaatcatgattaccatactctttataggcgatgtggtcggcgaacccggacgcaccgccgtgaagcacatgttgccggaactcaaacgggaacacggggcggacttcatcatcgtcaacggggaaaacgcggctgccgggagaggcatcacgccccgtctggcacaggaactgctgcacgccggagtggatgtcatcacaacgggagaccatgtctgggaccaggcggagctggccccgtggatggaatccgaaccgcgggtgctgcgtcccgtcaactatccgcagggaacaccggggcacgggagcgtagtcgtggaaactcccaaggggaaaatagccgtcatgcaggttcaggggcgctcattcattcagccgccgctggaaaaccccttcctcatctcggaagcggaagccaaaagactcagggaagaaaaaggcgtgcgggttatctttgtggacatgcacgcggaaacgaccagtgaaaaaatctccaccggctacaatctggacggcctggtttctgccgtcgtcgggacacatacccatgtgcagacggcggatgaaaccattctggagcgcggcacggcctacctgacggacgccggcatgtgcggccccgccgtcggggtgctgggacgggaacgggaacctattctccagcgtttccgcacctccatgccggccaaattccccgtagcgaactggcccgtgcgcctctgcggagccgtcgtgcaaatagatgaagccacaggcagggcgctcagcatcgcccgcatcaataaaatcgtggaaaaaccggcctcctgacatgcatgcttcagcagcattcctcttcccgtgcccggtggcggctctctgcggatgttccgaacatggcggaagcctcgtgaagcgcgaccagaacgcggattataagaaaaacctgtttcaacggacgccctccatcacactcgcggaaggaaaaagctgccggcgtcccgcctccccttcccggaataacgggaagctggctgtggcgtccggaatccaaggatttcccgcgtttccatattttcaggatgaagcaacggacagaaacccgggcgcccttattccccttaatctcccatactccggaacagacacgtgatcatgaactatgaagccagattcggcggtataggccgcctgtacggaaacagcggactatctcttctcagaagcgcccgcatagccgtcgtcggcattgggggtgtaggttcctgggcggcggaagccctggctcggtcaggcgtaggcactatcattctgatggatatggacgacctctgcatcaccaacaccaaccggcaaatacatgcgttggcgtccacaatcgggcaatccaaaacggaaaccatggccacacgcctccgggaaatcaacccggaagcggaagtcattcccatcagcaatttctacacggcctccaacgcggaaaaactgctgtcggcggaaccggacgtcatcattgacgccatcgactccctgatacccaaggcccacctcatcgcctcctgttaccgcggcaagcaaccgctggtaacctgcggtggcgcgggagggcgcatcaatcccgcccggatagaaatagacgacctctcccgcaccaggggggatcccctgctctccagcttacgctacaggctgaaaaaagattatgcccttccgcttggagaaaaagcccggaaactgaaaatcccctgcgttttctcccaggaaacgcccgtatatcctacctgcgacggaacaacctcctgcacacgtgatccggaattccaggggaaaatgggttgtgacgccggatttggctccgtcacccatatcacgggaacctttggcttctttgcggcttccgccgccattcaaatgctcttaaataagaaaaaaacaccatcgtcatcatgaacaaacgcctgcttcccctgctgggggccgccctccttcccgccttgacccagtgcaacaccctggaaaaagacattgccggcatcaacgcccgcaatgcggaaatagcccgcgaacccaggggaaactacttcgtcggccgccgctaccatgtaccggcaacgcgcttctggggatacctgcgccagccgggccagacttggagaacggcccaactcgtcatcatggatgaaagcgcctgccgcaccccggaccgcctgccggaatacaccggaaatccgcgctacgcctacgacaacaactatgaatacagggtatacggcaaatacacgggcaaatacggttacgaacccaattccaatctgaggctgcccatcttcaaaccgaccaggtttgaggtggccaacaccacccccggctggctcttcaaaccctcggaaaaatatgataccggagccgttactctgcgccctgctatcatgcccgcgacaacctccctcccgatccggtaagaaaaacctgtccgcaaaaacgggcccggaaagataaaaaagaagaaaaagcttgatattttcatttctctgcgctaaaaactccccgccttaaggcctccatgctcaggtggcggaattggtagacgcgctagactaaggatctagtggtgataaaccgtaggggttcgagtcccctcccgagcaccaattgataaacctcttaattcgaaagaattaagaggttttcctttacccggattgcaaggtctccaatttatagccattatcaaaatcaggcacgaattcgcaaaattcggaacacgtttggtagccattggtagccgaaatcgctcttccaaagccacatttacagtcgcatgtacaaccttgaatgttacaggagcatttttgaggagacattttacatgacccccgtcatttttctgtttttgaagacttcttccgggagtgacggaattcaaggcatgaccctgtcgtggaaatgtgctacaaagaggcaatgcccaaaccttccgtcatacgatgcgttcttgatgaacaacgcaaggctcaaaacaggaaagcggtctaccgtgtttccataccggcggagttgtcggaaacaggcaagaggcagaatcgttattttacgacacaacgggaaggaaacgcttttgccgctcagttgcgaacgagaaggaatgcggaaggaagcagcgtgttccaggtttctgcggcagaggctcagttgttccgggaggcgcaggacattctggagccttatggcgtggatgttttcggttttgtgaaaggaatggcctcggtgctggaactggtgcaggaagtttcggaaatcggacggcttgtccggatggggctggagcaggaaaagagagacagcaaatccatccctttttgtgacgcagtatcaaggctgctggaagtgaaacaagacgttcagaagcgtcgggaaagtacacttgcacagatccgctacataaccggacgcatcggcaaatgctgcccggatttcgctgtgacattgctctctcagctcacgacggaagattgccggcagatgatctcccaaaccttcaaacctgataagcagaagaatgatgcacggaaaatcctcagcagtatcttcaacttcggtatcaagaggaaatggtgccgtgacaatccggctcaagcccttgacattatttccattcaggaacatgaaatccatcccttgattccggaagaaatacaggccttatttatggcgtgccgtccaccatcgccggaagagaaggctcagcccaaaacgagaaagaaaaccgtagaaggtgcaagattggatttgacctgttgcctggctccgcttgcgatcatgacgtttgccggaattcgcccgcaggaagtaaccaggctgacttggaatgacatctttttggacactccgtcaaaagtcatcaaagtacgcagtatggcctcaaaaacgggagggacacgtcaagtaagtatatgtgcggcattagagtcttggttgcgcatagctcctcgtcaggaggataactccatatgtccgccccagtggcccgtccgatgggcagggtttcgttatagagcgggatgggatgccaatgggaaacgatggcctaacgacgccttgcgccacaccttcgccagctaccatgtccttactcatcgagacattccccggcttcaattggaaatgggacactccagctctacccagatcatgcaccgttacatgaatctgtctggggtggatcaagagatggcggagtgtttttggaacatcgttcccgaagaagatttctacgctgaccggaatgcataacactgcctactgattcataagtcctgggatatcttcttctcttctcacttatttttagtttgtttgtaggaggaaagagaaatagacaccatgaaagcgtcaaattcagcggcatgatgcttctgaattcccccatggggacggatcatcctgacatgatttgaactcatggcttctgccagtaatttgcaatggtcgatttactcgtatcgtaacgtttggcaagagtagcctgatctgcccagacgaccgaaccggattcggcagcctgccgggcaagaagaacctccagacattcctaaatgccccttagttcttcaataatgtctcagcagagacaaatgcaccttctatgattttcatgttacttttaggataaatctattatgacttggatttttgttggactttgtccaacaaacagatagcttaaggatattatgaggttatgttgtactggatcgatgttgagttagggtaagattttgttgactatcaacgcattattatacaaaaggtgcgtcaacgctttttgtctcaaaatcttacatttgagactcttgcttagtaatatcaattacagaatggtggctcgtatttacccccttttccattacatctgctatttttgaaatatattttttgattttatatcatacatttttaattttcatcaaaaaatatgatataattatgaatgtatggtatttttattattttcttcctctgctccctcatctcttttcgcccacccactcacgggtaaagatgacaaaaatccgtcaactctttgttttcttttaacacagcaatcttggtactggaaggccggcgttattaaatggtgttgtctttcatgataggagacccacctcttcagtcattgccgggctagtattcattatttctgtttttcttacggatctatgaaattgctatctgtgaccctataataacctcttcagtaacatgatactcgtaaatatcccgatctgcccggtttgcaaagcaatgccagacaatggcgccggtcattaagaggatgaacaaaagaaagcagacaagcgccttattccttctcgaaaggacgggcttatcatgaacatggggaattgatgggccgcactcctgctcgatgcacctgataagttcatcatgatagtgtgcggcagtttctctgagacaaatgtccggcacttccttgtttttatgatcctcctctttagtaatggatggtctgtttttcattgttgttttccttgttggtgacatgcgttcccctggcaggaacatacggcatggcgtgaaaagggttatcagagacagcacctgccgtgaatgatgagcttgaccagccattgccctcttttggggaaggaacttgaaagatggataatgactgttgctcaattgccacacttgaagaatatcctcgctacaggaatacagcattcccggcctgttggcaaaaacagcgccggcgcataacgaggacacagtatatcggcacatgatactaaaggtctattttatgttccctagcttgcctgacctggattaatcctgcattgaggagtaaaaagaccatactccagcaaatgacggcacatatcccccattttgcataatacaataatgccgacttatacaacaaaggactgttccaaaacatgtgaagccctatcgggataacggcaattcgccaaaaagagggttgaagaatggagggaatgttgttctgccgttgtttcttcatcgcaagccagaatgccccggccatgattgccgaccaggaaacatgaccaaagggagcaaaaattcctctcattaccgctatatccaatggatccggacctgggccggtatattcagaattcacgatataacccgctgtttcaaaaccagcgaaaccggcgcctacagcggcaccacacaacatgccatttaaaatttgcccattcagaaagaattttcgggcaaagaaaatggcaacaacaagttttgcggcttcttcaatgggaccggcccagtaagcagccctgggattaccggaaagctcgttcaaaatcattgtaacaatcaaagacaaaatccctccacctagcaccaggacgataatcgaataccacgagatgttccttctgacattaaattccgcaaacaggacaagaatggaaaagggcacagcaaaacttatggaaaacaacagacctaaataagcggcaccagaaactacaggagcgttattaaatgcctcaaacatgagtctccacccgatgcatatcaacagggaaagcgcgagaatgcgggtgaagagccatggcgaaggccaatccgtagatatttcttccagcgctggggtagatttcgacccgcctgacgtaaaaaaatctatcctttcctgcgccgtcctgcggcggaatacccctttgaatatgcttttcaaactgaatctttctatgggagaaaggccggtcagagatgatagcattccaaaaacccccacccagaaggagctttcctcctgatagccgctgataaattcccccactcttacccactcggccattccctctttccacaggaacgcctcaggagaaagctgtccggtcgcgtaccagttgcttatttccttgaatgtatagggtcccttgcggctttctccgcccgctgaaagaaaataagacgcttcctccttccccggtctggaagcgtctgatgtacccgcctgttgcgaatgcggttcgtccttctttttttgaacttcgcgaagaggaagccatgccggcattccttccgtccataccagatcatctccgctgattcttcgggaagcatatagtttatctatcttctcccatggaaacggccccatttgagttccgtccggcagtttgatcaaataagatttcatcttgcctcttcttgttgtgaatatttctttttcctttcttgaggacgtggaaatgcctgaataattctttccgtgtaccagaacaccgcgatcggccatgggatccaaagccaggaaagaagatcagaaaatggtctaaattcagggagggctccagtaatgatactgcctccaaaggtgagttgtgaaaacagcacgaaggcaaacatcggccatgctttcagccggaggctggtttgccgggaggcccgggcaagccaggaggcgttgtcggctaatccgacaaagcagacatacatccagtataaattaaatacgggaacgaacaacagccccacaacctgccccgctgaggggacgcgacgaccataccgggcaatgggctgtatgcatttccacgccctccatgtattgatcagcaatgcaatctgagtatacaaaaagaataatattcctatacctataaccgttaggctaacccgggcattacctgcataggttgctgatgccactataatcagcaacggggacaaaagatacagcatggccattgtccagaacgctctcatgtcatacctctgcccagagggagtacctctttcatcctgcaacggaagattgccgtatgaagcggtttcttctaatggaggcgatgttttgggcacaggaggcatttccggcattaaatgagaattcttgtcatcttcgcttgagcaagaagaacgggagccttccctccttcctcctgtgatttcaggagaagcagtttgttgaacatttttcccgattaacgtttcaagcgcttcccatgaggatgcgcccatcttgcagcaaagaagagatccggccaaacgtccgttgcgatacagggctttcatttgttctttggtgtaagggccttcagtttctccatccggcagcgcgatcagataggaggattcatcagcctccttccggggattgccctccaaaacttttgccgcaatgtctgaatatgagtcccattcagaagactgagtttcacgaatacgggtatcggaccgtatggaaccctcttcatggagaacttgaagcacatgctcggaataggggccttgcagattcccggaatcgtcgcaaataaaatattttttcatctttgatttgaaaattgagttctgatatccgtgatgctgttacaattttctgcacaacctgcaaaaaactcctaaaggaatgacaatcaggagccccagaaaaatcaacgggagagccatcccggaaagcgggctacaattcgtgtcctctgaaacaggatccgtatcttctgaaatgccaagtctccgataaatatcttccgggcgatccatggaaccacccataatgcggcttctcgcttcgataatgtccctggctcgttgtctgcatgccagagacaaattagggtcataggtttcttgtgaagtgcctatcattttatcaacctcttccgcccatacctcatctcccatttccatgacagtaggtaacgaaggaaaggctctggacaaactggggtgataggctgttccctgtcctgttttattcgaaagagcacggtagtgggccatgttggtcaggtactgacgcatggccgggtcaatggttcccttgtcggcgtaagctttctcggcggcctttgagatctcgacggggtccgtggacgtctgaatgacgttcctgttcttctcgtcaattccctccaaggctcgtgggtcaggagaacccaaggtgcgatatatcatcctgttggtgtcggtatcgctcatgtacttgacgggaggtgttgcaggtgccttgggcctgtccggaactgttagatgaaacagtgtggaaggcgcttttaccgcatccatgttctcttctgcttcttttcgtattttgggtaatgctttaatagcaagctcatcactttgggctgcggctttttccatccaaaacaatgcctgttttaaatctttttgtgttccttctcctttgtaatagagagaggctaatataaatgaatcgccttgaactcctgccgccgccgatcttgaaaaccacttgaaggcttttttatagaagactgaattactttcggcaagtcgatgataaaaccaggctgttcgtgattttaaaaaaggatgctcacacacggcgcgggatggtttgtattcacgattatccgacatgaattgatccacgacggatttccaggaatcatcatttattgtacctttaccgcgtttattcaccaatctgtttatttccggatcaaatgcttggcgtaacctattgatttcttccattttttcattaaactttccatctttgacagcctttaagataggcaaaaaatctttcttttccaccaggcatccattctccaaaaggatttcaactatgtccggcttttcaaacatgacggcacattgcaataatgaaaggtgatccctttccggatatttataattgatgtctcctttcccggaatgaacaatcttgtcaaacaaatcaacatcatccctcaaaatgcaattcagcatgagttcataataatctcctttggacagatcttccactctagcggccaggacttccgcgtccgccgaactgtttttcaacatggcgactaactgtctttcccgttcttcctcctgttcacgggcgatatgctcttttctcagacgctgttcttttctcgctcttgcttgctgaaatttttcttccttgttcttctcacgagctaactgttgttccctttcttcctgttctcgggcaatttcttcctgccgtctgtcctctttatccctgacttcctcaaaccggcttctgaaatctatctctccatgataggactcggctatcgccgcaacggcaagagccagactctccgcgtcctgaggaatggtcttatacaaggtgcaggccagagtatcgctttgcttcaacgcctggagaagttccctctttccactaataagagcatgttccgcgttcaggataatctctcttgcctgcttacgggcacgattggccatataggagttaggctctcccgtcaatggattcggcctcatgttattctccgcctggcgttcatattgttccgctttggccttggctccggcttgctgctgcaaggcctttttgtaagcagactgcgcggtaaaaagccgtttgatggattgaatgacctgctccgcctgattccgccctgcgggatccaaggactttttactctgctccaatcttttgacgactgtcctggccccctcgacactccctccgcttatttccttcaaggaaccgtccgcgtacggtatccggtttttttcttctcttccggcagacctggaatccgtcccaacagtatttttatctgcctcttttctcttctgttcttcttgcaagcatcgttggttcctcttctccctctgtgcggtctgctgttgctcataggttgatttttccatccagacgccattgacaaaacgctttccggaatcatagttgtcttggtattcctgcaatcgcttcagccatggatcgagaatagctgaagacttgggaaaacggtcacgaaacaccctcatttcatgtctttgtctgaggagatcttcatattgccaagagtcgaccaattccagcggaagggtattgggtatttctataaaccagtagcgacctccgggaagatagatatcttttccattgatatgaaaaattcccttattcccgttgaatcgttttcgactgtacgtactgacatgagcgagagaatcttcataaaaggtatgttgtttccaggctacaagtccggctccttcacacaagaaggtcgaaaaaactaataatccgacaatgtaaaagaaaatgcgcttcatgatgatggtggatggaggttatagttaagaactcttcaattttttacataaatctcttttgaataatttgtctttttctcgaaaatacttcgcctgggaatccgatattttaattcgggtatcttgaaagaattttttcttttcctgttcagaagcaggtaaggatggcttttctaatgtccgtttcaaacgtacttttattaacttatctctttcacgaaaatcccgtatatagggatcctgtaaaaacttttttctcatttgttcaaaagtctttggagaacaggcacaagataatatctgctctctttgggcattaatcgccatcatttcccctaatttcattgcgagaaatcccaaggatgtcccggccgaaaaataccatgacaccgcaccaaaccctcctaacaaagaagatcggccagcagtgcgcataacggagcttaccaaggattccttatgaacatttctattcaaaatataagaaattccacttcccagtagggctgctgttattgaatgactaaagaatgaagcaggatcaatgtagcaggtataagttttccatgccgaaataaaacctgccaggatgttttcggctccggctccaatcaataaaggattggacgtacttattcctgttagcaattctatactcccctctccaaaggtatcttgaaatatttccgcattcatgggaaggtcgccagagattgcggaaatcagatcctcatatccttcaagtccttcttttattcctccaattcctttgaacaggattcccccccgtctatcccgttcagcacgtccatgagattgattgatagatatttttggggaaatcctatgcttatcaaccattctcccagtccggactgagaacaaccgggaagaggaattcctgccttggtaggaaatccgtcaggagaatatgccccaggtcatgcatggctctgggaggatcacgaaaaaattcggggaggacatccatgaaaagatcgtgtcctcctttccatctatggttcccgccgctgataaaatctgctgtttcgcttttcgccagagagggaaactgcttatctactaaacaccgccattggtgcgatgggattgattcgtaaaattttcgaaaccagataatgttcttatgcaataattcttcatacagcaatgagcatagaaaggaagacgtaacaacatctgccataaaaatatcccggcaagttatttagttaagtttatgctgcgtctttcccagtacacggacaatccttgttctacacctttactcaaagccttgattgccttattcgacagagttggcgcatcgtcatgaaacataaaatatccggcaataacagaaagcgctaatccgccagtgatggcgattacagggatggtcacggatgtacctgcaaaaaagactgtcatagccgcaagaacgcctgagccccaccccagagcggcccctattcctagcacaatacaagtcacccctccagttccggaagcgagagaagcggcttgcttgatcaatttctttttttcttttttatccggcgccaatacagcttctgcaaaacaacaagccatttccacttcttgaggtatttctccaattgaatcgcaacaatacctctttattgttgagcagacttgcctcatgtcaagatagttcaaatatcgctgatcttcaggtttggtagaaaggatttctgatatttcatcacgaatgattatgtccatattgacggtaatttgatccaatgtcatagctgtaatgatggttggtatgttgatgaaagaattcggaattatgtagaataatcttgtcgtaacatatttcagaatattctattttcgtagtcatgttgctcctgtccctcgttttcaatgtgcggttcttctctgactacgaggagaaattagaatcggggggggatggcttacagtctttgcccgtttgtgcggacaatgcctttgcctccgcagtggaggcaggtggtgttgccgaacttgccgctgccgttgcaggcggggcaaactttgactccatctctttgtcggcatgcggtgtagtcgttggcagacggggaagcatccggggatgacagacttgcatgggctgccggaacacagaggaaagcggctatcaaagccatgagggagacgcaaaatgttttcattggtggagggcttttgggtgagaggttaaatgaggaatgaaacaggcggaacatgcggtttcttgttctttcgagccggacgcagcctctctgcttatcccgatgacaatctccagaagaacctgccgaagggaaaggttacgggaggccattcgtttcagaagatacaatctggcttcatcgcttagcttctcgattagctcggtgatatcgcactgcatattcgccatacggatattttttatatctatccaccccattttgtcaaatagtattatagctattatggaaaaatagatatttttcagagagctttgttatcactcattcaccttcttctaacgatggtttttccggcattcgcctcttgggaattgacgcgcaatagcggaaaagctagtatcacgaatatgagttcagattccaaaccgcagatggagttgaaagccgacgtcaagcgttggctcaaggctcgtgggctggactacaagtggttggctgagcaatgcttcgtcagtgaagtgaccgtctacaactggatggccaagaaaaagattccggaggtcaaggaacacatcatccgttccctgatgacggagatgcccgtgactcttccgtccgtgaaggtggaaacggagtcccgcgtgatccttcaactgccgccggatgtccaggcggctctggagcgcaaggccctcgacagcaagatgacgctgaccgattttctggcgacaaaaatcaatgagattgttcgcgaagggactcccgcctctccttccctggtcgatgaaatcgaacgcgaggaattttcgaaagacaaggattgattttttccgtactgccggggcatgatcgaatcattcatccgccatgcatgaagcccccgttttccttcctcccggtcaaaaagttggtccttacgccattgagcgcgtcctcggccacggggcgaacggtatcgcgtatctggcccatgacagaacgctggacagaaaggtcgtcctcaaggaacattatccccaggggctttgtcgcagagattcagagactcaccttctggttccgctgaacgaagaagtagctcatacctttaccgattctgttgaccagttcatcagagaagcccgcttgatcgcttctctggagcacccctccatcatcaggattcatcgggtattcagcctttcgcccaccacctgtttttatgtgatgcctcttcttgagggcggaaccctgcgggaggtcatccactcagacaaacgcattcctccacgcaccatcatctcatggcttcagactctggtttcggccctcgattgtctgaatcaacatcacatcgtccatctggatatcaagccgggcaatatcctctttaccgggaaaggccagcccgttctggccgatttcggcaccgcttctctgcgccctcctcatggcacagtcaatatcctggctcattccgcatactcggctccggaattgttcacggaaaacgccgtacccgacatccgggcggatcaatactccctggcagcgtgcttttatgaactgatgacctcctatccctggaacaccatgtccggaaaggtcggtgaagcacatgcgggagagttattggtatcactggcccaaaaagagaaatccctgagatgcgtaagctgtcttcttgttcaaaacctctccctgaagagggaggaacggtctctttctccagaagcgtggctgaccgggatgaatcatgcccttcgcagcgatcggaggcgaagactccggagcagaattgtgacaatagccgccgtgatgctcgtcacagggggaacgcttacctggggactttatgagacaggcgttttgacgcaagagatcaggaaaactcctgaagatcttcttgtcgaagaactgcttcaaaatccggaaatcgcggcattcaaccgggaatcccgggaatttcatgattattatagccgcatgttcctcaatctggccaacaagaaggaaacttccgtccggaagatgctggaaaccatcaacgccgccagaaacgctgaagatctggaacaaatcagacaggcatggcgcaagcagcaacagtttgacaacatgaccctgctggcggcggaacgcgtgtatgccatcaagggaaaaggtcttgcccagcaatataaacatctgacttcacccgcatggttccggagctggaagcagaatcatcccggttcctgttccgacgatgttctcccgccgtcatccccgcagctcctgccaaggatattcccccatcccctccacaatccttcctacatcagtgaaagccgcctccgcatcaacgccgcttccagcaacgtcactcacgctctggagaaaaaggcacaggaattcggtatttacaaaacctcttatccggacggaactccccgcaatccgaaaatttcagagaagacgggaatctcgaagtgactatgcagcctattttgaaaatcaagctcacacaatgagtaagcctctatacgaatgcttgaaatgcaacgaaaaataatttagacttaagatgtttcatgcttcaggtaaactttaaaaatggggacacgtcgagggatgttttcaaacaacttcaaaatcagggagtaacgcgggtagatgcaatgtcgacttctttcagtctctcggcatttcagatgttgccccttgaaatacggcaagcttcatggaacctgcttctgcctgaaacagttctcaatgattgggaaatcttgaattcccaacaggatcggccctttttgaatcaattgacagttcctctctgggcgtccgaatgccttaaatggatagagaggccgagcaatcaaattcgattcagccaaaagccattgaccatgtcgatgtacatttaccatcatggagaagaggcaaattatggcattctgggaaattgtgctttaacgacagacggattgggactcactccggcaacgacactgggcagcactgcgcccatgtatggacctcaggtagaaatgttctccgctcaattcaaggattactggaacgccaacatagatacgaccatatctaactttcagcgccaactgcactttctggcagaccctcatcctcctacatggttctactacaaagcatgccatgcgttgctgcagtccacggaaaatccggacgattacattaaaccagaaaccggcatttacgattcttgtgtttggaataaactctattccttccaaagagacggagttcgcgccgttatagccaagctgatgaagcacaacggctgcatcctggctgacagtgtaggcttgggaaaaacattcgaagctctggcggtcatcaaatattttctcttaagaggagccaatgttctggttctctgcccaaaacgcttgagagacaactggagcatatttacagaattgggtgataaacgcaatgtgctcgtcaaggacaggttgaactacacgattttgcaccatacagacctcaaccggaagaatggccgcagcggcacagtagacctggctcatttcaattggggtatgtatgacctcgtcgttattgatgaatcgcacaatttccgcaaccgccccacccacatatcacagagtggttcaaggtacagtttgctgatgaagcaaatcatccaagccggtgtgcctaccaaggttcttatgttgtcggcaactcccgtcaacaaccgtgtggcggatttgaaaaatcagattgcttttatttccggagaccgggacgacgcatttgcccattatggcattccaagtattgagacaaccaccagaaatgcccagcagcgcttcgtccgatggcttgacctgccggaagaggaaagaacgacatctcgcctgctttccctgctgggacaggattatttccagcttctcgatatcttgacgattgcccgctcccgaaaacatatagaacgctattataaagatggcgacgactccatcggcggcttcccccaacgactggaacctgtcaacttctacccgaatattgcggacgagtctctgttccccaccatcaagaaagtcaataacgacattgtccgtctgcatatggctgcctataatcctctttcctatgttttgcccgaaaaactggacgagtacatggaacgctatactcagacgactatcaaaggagaattcaggcaaatagaccgcgactggagcgtttcaaatctcatacgagtcaatcttttgaaacgcatggaaagttccattgccgcgttccgctttactgtaaacaaacagttaaaaacatgccgcgatctgcttgacaagctggaacggcattctgaatcacaacttcagacagaatgttatgaagacgaggaagatgaagatttggaggataccattcaaagaggcactgtggaagtacgcctggaagatgtagatatgcggcgttggatttccgatctcgagcaagacatcgccgtcctttctgcattggcggaaaaagcggcgcgcgtaggagtccagcaggattgcaagctggccgagctaaaaaagctcatcgaggctaaaatggaaacccctatcaatgaaggcaaccataagctgattgtcttcactgcctttgccgatacggccgagtacctgtacaaggaactggctccctgggcaaaagaaacattcggcgtgtattccgccgtggtgacaggagccaggaaaaacacatccaatctggatggggtccgttcttctcaggacggcattctgtcccatttctccccccgctcgaaagaatgccctcttgaaatatcccagggacgggaaatagatattctcattgcgactgattgcatttcggaaggccagaatcttcaggattgcgattatctggtcaactacgatatccattggaaccccgtgcgcattattcaacggttcggacgtatcgatcgtctgggcagtgccaataagtgcattcagctgatcaatttctggcccacgcacaatctgaatgaatacattaatttggaaagccgggtgcgaggaagaatggttctcctggatattgccgcaaccggagatgaaaacatcattgccgcccgtggagaaaaacaggctcttgcctacagactcaaacagctggaacgcctccagaaagaagtcgtggatctggaagatgttgatggagggctttctattacggatttgagtatggagccttatcgggctgatttaacggcctttgacaaactgcatcccggtcttatcgaacaattgccctcctatttcatggccacacttgatgtatcgaatacggacattcaggccggagcctttttctgcctgcgctcccattccaatgctccggcatccgccgattatcccctggccccctattatcttgtccacgtagcagaagacggtacggttaatggagattacaagcatgtgaaagtctgtctggatctactgaaaaaaacggtatggggacatgaagaagtggcgctgccccatgtaagacaatttcacgccaaaacaaaaaatggtgccgacatgagccgttatacccgcctgctggcttcagccgtcaatgcggtaacgggaagggaaaacgaatccagggcggcaagtattttcacccctggaggcactgctctgggcaaaggcgcggccgccaagggtattgatgatttcgaagtgctcgccatgctggctctcacacgctcatgacccctgtacagttccatgaattcgactggctgcctgaggacgcgctgaacggacgcacttctctgcccaaaacaagcatgctggcaagcatgcccgccgggaaaggggatgtaacgctgattcataaaaatatacgttcggcatgggttctgtctcttcggccggataatgtggggattcctgcttataaaaatgaacagtgctcttataacgaactcctcgtcatccatgcagaattgtcggagaaagcgaattcttcgggcatcgtccggcttcaggagatgtttcatcgttccattccctatcccctgtttctgtggctggcacatggtcctgcgtattttttatctgccgtgcccctgcggcacaaccgcgcggaaaaaggcaaggaagtatgggaaaactccatcacaaaagtccgaagctttgaacttgtcccggcttttaaggcagccctgcatccttcgttttctcatacagcaaacttgcgcgatttgtacattcgctggatacgatccttgtacgggcttatgattcattcccttccgtggacagagctcatgggaaacccacagccattttttctccccgacactattgaagcggggacccgggcctggggttctctttccacacttttcgaagaatggaagtctttgaattcccggctcaacaaggaacggcagcccaaccatcgcgtcacgctgggcaacaaacgctttgatgtaagggaacaaatactctcattagctgcatcattgccatttcgggctttccccgaatgattatcctgtgttagcgtaaggcaagagcacattatataccatgtcttacgagaaactcacatcttcctctcctgaagcccaatccgaatcacccgttgcggatcatgtgaatgcccttgcatcgcttttcccctctgtcgttcgggaagggaaagttgactttgacgccttgcgtcagatgttgggcgacgatgtggcgaaggacgacgaactctttggtttgcaatggaaaggcaaggctcaggcgcgccgggcggcgacaactccttctctggggacgctccgtccctgcaaagaggaaagcgttgactgggatacaaccaaaaacctgtatctggaaggggacaatctggaagtgctcaaacttctccgtaagtcatatgcgggaaaggtcaaaatgatttatattgatccgccttacaatacggggaaggaatttgtgtatcctgataactatcagaatggtattgaagaatacaaaaaactgaccgggcaattgggcgtgttcaaagccaatgcagaaacaagcgggcgatatcatacggattggttgaatatgatgtatcctcgattaatccttgcaaaggatctattgagagatgatggtgttatttttatttcaatagatgatcatgagctttctaatattctttctatttgtaatgaaatatttggtgaagttaatttcatttcaaacatatcatggcaaaaaagatacacaagaagcaataacacagataatttcacaacagtcattgatcatattgtggtttatgggaaagatgaatttcaggtaaatttacttgaaagagacgatgttgccaattcaaggttttcgaatcctgataacgatcctagaggaccatggaaagcgaccccttttcttaatcaagtatctccagaaaaacgtcctaatttatgttatcctatcgttaatccctatacacaaagtgtagcaaaccctacaaataaggcttggagatatgaaaaaaagaaatttgaagaacttttgtccgaaaaaagattatggtggggaacaaataaagataaattagtgcctgatataaagacatttttatctgaagtaagacaaggaatgacccctataaatttttggtcttatgagtttgctggacatactgatcaagccaatgcagaaataaagaatatttttggctcaaaaatatttgatacacctaaaccttccttactaatacggagaatgatagaacattcttgcagagaaaatgatattatattggactttttctcgggatcttcaacaacagctcatgcggtcattaatatgaatatggctgatggagggaaaagaaaatttattatggttcaattacctgagccatgtttggaaaatagtactgcatcccaagaaggatataaaaatatctgtgacatcgctcaagaacgtatacgccgtgctggcaaaaaaatcaaagaagaagctggcctacaagggcagcacttggatatagggtttcgtgtgtacaagttggatagttccaaccttcgagtctggaatccggacgccgataatcttgaactggcgctaggctcccatgaaaaacatcttctgcccggaaggactcaggaagacctgttatatgagattcttctaaagcagggtattgagttgacggaagatgcccgaatcagggagttgggagggaagcgcgtttacagtcttggtcacggacaatattacgcctgtatggagacagtaattccctccgatcaaatagaatcccttgcgctggggattgtccagtggaaaaatgaggaatctccggacaatacccagtgtgccgtttttgtgatagacgaggcgttccggtcagatgccgacaaattgaatttcgccaaaatactggaacagcacggcattccttccgtcaaggcgctgtaattggaatcccgagcctcgttatgaacgtcaaattacattttgagtcccatctggactaccagcttgaggcgatagatgccgtctgcgatttgttcaagggacaagagagcacgtcccagtctgcctttaccgtgtgcggaggcctttccctggaaccccaaatatgggattcctcccggggacagatgatccagcaagggtatctcagttccatagggcaggaagaagggattggcaaccgcctgtgcctggtggagagcgaactgctggacaacctccatcaggttcaggaaagaaatggacttccctcatcagagagcctcggagaactagatttcaccgtagaaatggagacgggaacaggcaaaacatacgtgtatctgcgcaccatttttgagctgaacaagcgatatggctttaccaagttcgttatcgtcgtgccgtccattgcgatcaaagagggcgtattcaagtccattgatctgatgaaggagcacttccgcagcctctacagcggagcgccaatgcattactttctgtatgattcttccaatctggaaaatgtgcgcagttatgcgacctcctccaagattgaaatcatggtttgcaccattcaatccattaccgatattgcggagccttcctttagcgacacagcgaaaaaaaaaggcaagaaagcccggagggtcatccatgaacctaacgaaaaaacaggagggctaagtcccattacattcatacgtggctgccgccccattgtcattattgatgaaccccaaaacataggagccgcgggtgaggaaagaggcatcaagaacctctcgcctctgtgtacattgcgctattcggcgacgcacaagcaataccatcatcctgtttacagtctgaatgccgtcgacgcctccgaacaaaaactggtcaagacgattgaggtggccgatgcctccttgaaaacgcaaagcgcttctccctacatgaagctgctgaaaacaggcgagtccaagggctccccctatgctcaaatggatgtcatggagcgaaagaagaatggcgactatgccccttcaactatcaaactgagaacaggggacatgctgtctctgcagactgggctggatatgtatggctccgccatggtgcaaaacatctatgaagactgtgtagcaatatcaactctggacgaacctctttatattggttcttcggcaggagtcgactatcaggatgaccttctgagagccatgatcaaggcgacgatcatggaacatctggaaaaggaagtaagactgcgcccgctgggaatcaaggtcctcagcctgttcttcctggagcatgtagcggattacagttccgacggtatccacagggacggcttatgcgcccgtatttttgaagaagaatatgccagactgtcccggctggcaaaatatgccagcctctatgatccacaccctccggaagcatcagctgttcacaacgggtacttctccatcaccaaacggaaaaagggggaaacatctgacaggtgggaagatactgcggataaaacagccgccggcagggaagcgtccgctcgtgcttatgagctcatcatgcgagacaaggaacgtctgctcagcctggacgagccgctcaaatttattttttcccactcggccctgaaagaaggatgggacaaccccaatgtctttcagatatgtgttctacgtgacatgcagagattgctgacgcgccgccaggctatcgggcgaggactgcgcatttgcgtgaatcagaagggggaacgcgttcgggataccggaattaaccggctgaccgtcatcggcaaagaggagtttaataagtttgccgcagccttacagaaagaatacgaacaggaaggcttgcaattcggcctagtaaccaaggaaaaactgggggctattacgtaccgggatagcgccggagagattgttcgtttagggcagactcaggcggagtctctgattatctatttgaccgaatgcggattgattgactcccgcggcaaggcaacagatgagctcaggcagcagttgaaaaacgggactttttctgttccggaggtctatgctgcggcgaaagacgccatcgaatcccgcctgacttctcttgcgaagtcgctccagatcaaaaatgccaacgaaccacaaaaggtaaaaacccggaaaaaagtactggatagtccccagtttacggaactctgggaccgcatccggcaaaagacgacctacagagtgaaatttgattctcaagctcttgtctcctacgtcgttccaattctggatgaagaattgtctcaggtacgggcacctctgattacattgaccaaaacggaagttatcgtaggagccggaggcataacgggtgcaaacgaaaaacagagggacatgggtgcggtagacacgtccagaacgcctgtccctgatttgctgacagaactgcaggaacgcacccaattaacccgccgcactctggtacagatactgacctctctggaaaacttgaaggcagtccgcgtcaatgcccggcagtttttgaatatattccagaaggtcatagacaaaggactttccaaatttttgatcgatggcgtttcctataaacctgtaaccatagggacgacctactgggctcaggagttactggataccgaaatacaaagttacgcctcggatgtgatcaaaacggcagaaacagataaatgcctgactgattatgtcgtgtgcgattccgaagtggaacgccgttttgtcgagaacgccgacgcatgtgaaaacgtaaaatgctatgtcaagctgcccggatggtttacgatccccacccctctgggttcatacaatccggactgggctctcgtctatgaaaaggatggtgaagaacacctctattttgtcgtggaaaccaaaggggtggattctttgtttgaactgcctgatgaaaagcagtctcggaagatcctttgcgggcgcaagcattttaatgaatgcctcgcgaacaatcccggcactccctgcccgccagccgaatttataggccccgtatcatcggtagctgcattgcaacaacagattgtacaatgattttcagaataaatagaggaagattcatcattccagcagcagcaaataccagacgatttgattccaactatgagccttcttgattccgtctatttacttctgcaagaatctgcatctcccatgcgtcctaaagaacttgccgctgcactcatccagtggggaatgtggcaatctcaaggaaagactcccgacgctacagtcggagcgcgtatctatgaggatatcaaaaagcatggaaatcaatcccggttcatcaaggcggcagaagggctctttgcgcttaacccgaacgtgaaaatcgaattgtcggactcaggggaaaaggcaggaaaggcggttaaaaggaaacaaccggaaaagtcagcaggttcttattctttttcggactgtgcggaaaaagtcctccttcacttttccgggaatgcccccatgcactacagggatattaccagcaaagccctggagttggggtggctcaagacggaagggctgactcccgaggccagcatgtacgcgcaaatcctgacagaaatccagaggagggaaaagcaagggaaaatcccgcgcttcgaaaagttgggcaatggaatggttgggctgaccatctggaaatcaaccggtttggaacgtcacattgattcgttcaacgacaaacaaagaaaagtcctgatggaacggatgatgcaattaaatccgcaggactttgaggaattaatcactactctgttgagtaaaatgggattttccgaagtgagcaggactccctacggcggagatggaggcgttgatgtgcgaggcattatgacggtacatgatgtcattcatatcaagttggcggtacaagccaaatgatggaaagccaatgttcagtctcctgtcgttcaacaacttcgcggcagtctgggaacggatgaacgaggcttgatcgtgacgacttccagtttctccaaaggagccagggatgaagcaacccgctcctcttcccatactcctattgacttgattgatggagatcaactggtttctcttctcgtggaatacaatctgggagtcaaaaagaatcgctaccaacttctggaactgactccttccttcttctctgatgaggaagaaatgtagatgtgacagctaaaaaagaggagtcgattggactgcctcttgagcgccttcctcagacaattcgtcttggaaggcatatctcatcgtcgggcgatgagattgtaaatggcttgtaacaactgagcgaggatcatgggatcagcggggtggatgttgagaccagggatcttcctcttcttcctcataaaaggaaggaggatgagaaccattcctctgcttgttccggatgaactcgccaaccttgtccgaagcatagcccagcaggatgcgggtgagctcgaacaggatgattttaatcatgggcatggcgtttgtgagtgggtgacggcgtcgatgaggatttgctccaaagcctggacaatggcctcagcgccttttttgtacacaacgacggcgagcagtttcccattgtgatggagaaccgcccagtagcgcgtgctcttgtatttgacgatgtggtacatggttccggtatctggatggatgtttcttcaacaaaggtagaaccacagaagcagccctgccattatcaagccgaaggccagcacgattccccatttgaggagtgcgaacagccacgggaacaggaaccagcctgccacagtcacgaggagaaaggtcagcatacggatgtagagtgatgatggtcttcctgttcgatgactgtccgggaaccggttgatgcccgagtattcctgccggccagccggatgttgcccaggtaggcggcccacttcaacagggctattctcccgtcccaggtgggatgccaggtgcgggggaagacgaagagatcgtcttcctccgtttggcggatgagcagtccacggtgttccagcaggcgaatgatttgcctgacccgtccccgttcttccgggtggaaggaggcgatcagctcatcgctcgtttgtccggatacggattgtgtgaggatcaggacggcggcttgcgctcccgtcaatgagcaggatggattcatgagatgtttcctttcctgttatctttttttattacactcaggcgatcaggccgcagacggaatcgcacaggccgtgcagagcctggctccgtttggcagccacatgcgggttgacggccttgaactgctccgtgaaggcgttgaacaggctccagacggtgcggggccggaattcctcatgaagcggctctcgccagtacctgatgacttccggcagaacggtcggcatgatggcccggcagtcgaccgcccggatcagaagatcatgagccgccttgtcggtcagtctctgtcttttgtaggcggcgatccgttcgtcttcgcggtggaattgctctcccagccttccgacggcgcgggaggtcatgaagcgcagatcccgcacggcgaacctcgtatgcttccgggagagtttcacttctccggtgaaggcaaggttgtcgcagacgaagacgcgcgttcccatgaccagggaggccgggaaggtcttgtcatgggaattgcgtatgccgacaatccacgagtagtcgtcggggccatcgtcaggacgcaggatttggagaactccgaaataccgctttccttcatggctgagggcatgggtggtttccccgatcccgaagccgtgggcggtgagctgggattccacttccttcagaaggaagtcgtggggaatcgggaaccacgattccgtacaggacggggtttccacacgggacagagttctcctgtcgatgacttcagccccgcaatggaggagaagccccttacggaatacagtcggaggaactactggagccgttgccggttccggcatgatgtttctccgctggaggtgagctgcctgtctggtatcttccaaaggcaggatgtgccgggctgtcgccggacaatgaggcaatgcgatgataggatacatattgatgatgaaatatgggttgaaacgaaaacacccgctcccctgcgaatgggaaacgggtgttgagggatgaagacagaagctaaatgcctgtcttcaagtctatataacgggcagccggcaagaattgctgcctaccgccaatcgtctgagtgaatggaaggatgtcgggactgttctcctgaacttgtccgatacttgtattgagcttgttcggaacttactcggtacggaattgctttcaaacctttccctgcaatctgttctctacaagtttcatttcatgatagggggcaaggaaatggcaggtaaatttcatcgaagggtattgtagcgcgttctgtaggagagcatgtaggctcgtttggccgggggagagaggaatgagcacttcactagggtctctacttcttctctggatttcatcaaatggtcgatgactgtcctaatgcgtttgtcctgcatccccagttgccgtccgaactcttcaaacaggttgagattcgtgtgcgtcgatgcgcctcgaaacaagccgccggacagggcgaaatcgctgtcctgaatgtgcaggcttgtgttgagcagatcgtacgcgggggacaaggtcatatctccctgaggagtttccagtacggaaaaattcttcaaatgcgcgtcgccgttcgaaaacagataattgaacaacaccagacggaagaagcgttccatttcaattttccacgcggggacgtaacgctggatgagctctcccatttccaggtaggagtaatcatatttgaagttggaaccgccctgggcggatgttttcccggccagtgaggcgaagtcttccttgcgtagtttaccgcccttctgagtaatgtcaaatcgccgggtgatataggctggttctccggtctgaaaaaagcatagtccgttgggagccgttgaaattccgaatagctgagcggcaatttgcatggtcacgtgttcgttggccggcatgtcggaagcccgggcgaggcgtgatgagatgggcttcagaagatgcgttccctgttctcccgacttggtcagacggattgttccctggtcaacaagaacagagagtttttcctgaacccctgagatggaaatatgctcgcggtttttcagaaactcttccggctctccatgaatatcgggggcgtcataaggaagaatcggagacacttttttaccgtcgaacagtttccgcaatccggccgggctgtaggaggtgaatccgggaaccagcgtcgaggggcaacggtcaatgttcatcgttggtataaggctgtactgttaatgctccaatcgtatcatcatgacctgttgcaaggagcagcccgaaatgatccttttcatccagatggaaatgacggcactgaatttccttgttgacgccttccgagagcatgttgaagaaaacgggaaatagatggggggaacggtactcttcggaggttttaggcattgtcaggctgatgggaggaagctcttctctcatcaggtaggaatccagataccggaatacatagctggaaggggattcttctgtcaacgttccggcagggatattccgcaacaatacaagggcgtttctcatgattcaggccctttcatcacatcggttcttttggggctcaacgacatttccagtcccagtacatcgaatagttccatcaggattctgaatgtcgggttggcctgcccaagttcgattttattgagcgtattgatccctatgccggaaagttcggacaaatccttcagggtaatgcccagtatccggcgtcgttctcgaatgtatgttccgatatcactcaaattcacaatacaatgtgaaatatcatgttttgaatgttctgtctactctgttttctggtaaaatcacaatatgatgtgatttttgggaaccgaagatatctactactgaacaagagcttgctttgaaaagaagtgttttggtgattagagccggaaaacttcccggctcaggaatttctggatacggcagataaaacaagactccgttgccggagccctccatggaaaggctccggcaacagggatatgcagatgtttaccgcatttcaggtgcagcaacctcctgaagtcgagcacagcttccgaaggaaggagccttgcgggatattcctcctgatttttctatcagttcgttgatcagggaagatgcctccagcttgttcaactgcgaggctcccttgccgaagcagagtacggccagatcatgaagtgcggaattgttgatcccgtttttacgtgccagcgataggataacctgcctctgtttttccgaacagctccacgccggttcttcggggtgagatgtctgaggattcgaagacggaggctcaggcagccgtgaaacctgacgcatggcaggaagcggagcaccggatatgcttcccgatccataggaggcatcagggacaaatccgacccgccggatctgggtatctacagcggactggagcgagctgtagagacgttctgcggcaaaatcgagttctgacgtatttccgatctccgtttcgatggagacttcaaactgatgggaggaataccccggcaggccgaggcgcttgctgtagttggcgatgagtttgatagccatgatgaattgatattattgatggttaatgataaaggcctctgcacgcaatgcatgtagaggccgggaaatggcggatacttgtcccgctcatcttcatataacaccatcgtcaccttaattgagggaggaagggggctgatgattccgatcaaatacctcatttatagcagaagctaggcttccgatgtaatcttgcggggggcggctccgccccccgctcgctggctctcttttttctttttcgctttcgctcaaagaaaaaagaatccgctcgacgacgcaagatttaacacggaagcaccccttccgcctcaccttgagcacacccgttaaaggcgtgcccaaggtggccctcccttcaatttaagggagcatgatttgaattcgtttttaccaaggcatgatatcttccggcatgtcttttcacgtatccttttctctccattcttcgcatgaaattgaccgtttccacaccaaggtttcggatgggccatccctccggcataatgagagctttcaaggcttcctccttgattcggcttgctctcagctggagttcactatccagagcttcagaccataatcgcagcttacgatccatattaaggacggaaaaccaccatagggctatggaatcggcagaaggcaatggtttgcttaaactattcaccaagtcctctattcgtccccgtgaatgcttaatggcatgatcaatgaggcggcacaagtcatccaggctgctacacattcgtcttttgcattcgccttcaggaaaatccgcaacaagcgcgcctctattacatctgagctcaaatttgaagatgtcagctgtcttggcgtagcaaacaagttccatgccattacgcggatatccatggcaggacacgaggctttcctgatcgtcctttccgcaatcaatggcgcctgcccgctctccgtgtgttctaaatcgattctttttgaaatgcttctcaaaaaatggcttcatctgattaacgatgaatggagcattccctgcggaaagataatggtagcagacttccatgcctgcaagagtaacgcttactccgttgtcccaaatgctgcccacaggatatttttcttgttaggtttggaagtaagctcgcttgatgtcctcccattccatatcaatcacagcattcagcatctttttgaggttagcagtgcgttgtgcagcagtaatgggttctgctaaccagttagcagatttctgatcggcaatggcgggattgctaaaataaattcgagagaactgctcttgagccgtctgttgatcggcggttccatctatcatccagagatgatttcttagtgttctcagaaggtttactgagatatacatggttatgaggatactttcctctttctggctgacgacaagctccacatgggaaagaggtggggggacctcccttaacgaaggaaatggccagaagggtgcgaattgtccaggcaatgaacaatggttgacaggagtattccgaggcctaggccctccttgataaggggacggtaaatagagggtgagcttcctggtcgacaatttcagttcattctcccgggatgttttttggtgaacgttgtgcaacaggctcttccccaaagcatgatttgaaggattgccctccagatgtttgatgaacccatgtagatcggttatgccatgcagagctgtcttgacggttagaacgattttgtcaggcagggctttttcttgagaaggaagtggacatccccaaaagaaggtatcccaagtgcatggggtgtgagaagggactgcttggaatggttgctcagtttggtatgtattttctagttcacagagagcctttgtcttgggcttccggatggatctgcatctccgaaccataccgaagagggatggatgacctcgctgtttcaaacgctgttccgttgcgtgaacgtctacaaagcgacttttcccgatactcaggacacatagaagcccctttttctccaagttgtagactgttctgcggcacgggatggcagaaggagggaacaaggaaggaaaaagggacaatttgacaagggttgttttccctaattcatattggaagcccttctgcagggcctgcgcttccaagcatgtcttcaatgccgacagatgtataaccctttcttcatttattcttttgcagggaagaattccttctttgatccatgaataaatgagtacccgggagggtgtagagcctaatgaaaaaatctcgttattatctacgaattctttgattcgacagcattgagattccgatatggaggatgcctgtgctgaccgcatcctttcggaatctactcagactgcgggtaatttaatcaactatcggacatggaatttcctctcctgactttcagtcacaagcaacttacaatgaatatgccaaatatcgagcacgtcccatatccgtagtacatgagaaacggatacagagaggacatggttcctgcatgccgacttttaaaaactcaatggttcattttccgaaaaatgaaatccatttttacgaagtcggaaaccagccgaatccccaacgagtcaaaagctgtgccaacttggtattggatgaacatttggctcctccttcctgcaacccggaagaaatggacaggattgaaaaagagtctttcttgcaggaggtgggaggcgcaaacaattgaagccatttttcacgtacatcccagcgagtgaaattcttaaatcctttttccgcacacagtgcgatgaaaacaagtttgagggcacgccagctattgactccatcgtgtttttctgccggcaggatcgtatccatggcaagaattctgtctgcttctttggctatttcggcggaggtgatatccaacgtccaacccaatgtgtctctggcgtccaatggagattcattttcaaaatcttcaacgggcgtttccaggaactttgcggcctttttcaaaggcaatgcccttaacatgccagcagctctacggagtttcagtatcaactgttcgcattcccggggtgttttaacgatggattgcgcatatacagcttcgcttctcaataccttctcatcatcaagagaacagtttgagtcgaacagagggtgtgattcgagtctaatactttcatcgcagtacaattcccaaggcaaggagtagtaaaggttcagatactcttccgaaaaacgtccgtattcatctactacaccagcatccttgatttttgaggtcaggagctgcctggggaaaagagcctgcctgtattgaaaggaagatgtgtggatctccatgcgaatgggggcatttggggaatacctccacgcacgcagatatcctcctttttctctgaggtcctttttaatttctttaagaagcgtttcttctctgtgattttttctcacagatacccccggatttgtttttgagtttgccaggatttctctccagctccttataagacgatctctggcggaagatacccgcttttgttttccctgtggcgtttcgatagagacagtctccgagtactcccaatattcggattggagggaaggtaaatgagctcgaccttgagtagtcatgattataggtggtttagattaagatgaggccttcctcaggcaagaagcaaaatggaagcttaatatttgattattatttatcaacgtattacgaataaaattcgatctattcctcggtagttcgatagttgtcaggaagttcggctatatgggtaaattccagagggatgcattcaaaacaagcatctcccatacaagtacctcaatactgccgtatcggtcaattcatgaccagctccggaattttctttccgggctcatcaccctcctggggaactatccatgcctggattgaagacagatgccttcctgtaaaacggataggtaagacgaactacatagatatgaaagctctgtctcaacgattggcacggcaagccctcggcaacgggttccgatacgttatggaagaaaccgagcttgtcaaattgtctcttttcccgaaaggaaccgatttgttcgacagttcctcctgcccctgtcgcagaaccgtctacaactgggaaaagaacggcatgctttgcatcctgtgccttggaagcagccggtttgtcgacctcagggcaacgagggagcgcttgcaaagggaacattcatcctctcattgacatagttgccgttgccccctttttaatcattcactcaaaaactttagagctcgaatttactctataggtagaatttactgacgcagtgaattttgaatatagagtaaatttatgttgtgcatacaaagcagatcaagtagaaaagtcctatggagtcaaggcaggaagcatcccttatttctacagaaaatgaattgcgtgaggcattcgcaaagcttcacgatacatgggactttccgcgactgtccattgagccaaccagagtggttcttgattttgaggaatatgatgatgccgggaggccgcaggaatacattgaactgccgacggtttacaggctgatgccgcctcaaaatctggattcctttagggatcaattactcgttcttccctgtattccagcggggccgttcgttaaaaaagccttggaagctcatgttgccgttgctgatcccaatggagcgttttattacaaaaaagggaaagtttattttggcaatactggaagccccttgaaacgatttcgattcaacaaaggcgccaaagacctgttctccggtaaaagcgaacgcattgtccgggctcttcttttcaatgtttccaaaaaatggagccaaaaggatttggccgaatcaacaagaacaagtacagccttggtgaataaagtcatcaaggggctggaagataggcaatttattgatcgtcatccttatcggcaagtttctcttcttcatgaacgggagttgttggacatatggcatgaaaagcgcgctcatcagagagttgtccggtattccattgtaggaatcggtattgccgaactggctgatatgttgctccagtgggcggagaagaacggagccagggtaggatttacacaatgggttggagcctggcaacgcgcctcttttacggaaccagtcatttgtagtgcctatgtgtctcgtattccggatttgtctgaattgtctccggggttggtgggaagaagagtggaacaagggggaaatctgctcttgttctattctgaagatcaggatgtcctgcgtcaactccaacgttcccgtcatgtcccgctggtttcggatgcgcaaatttatatcgatttgaagggacaggggctgaggagtgaagaagccctggaggcccttgaacaatgtccggatttttgcaggaatcatgaaatttaatcattataccagctacagcgaagttattacgaatcatgcgggaaaggtacttgcctccctgtggggagccttggaaaactatcgtcatggcatggttttaatagggggcctggtgcccaggttcatctgttccggcaatatgaataccactctcttgaggccggtgactcttgatgtggatttgggaatcagtgttgctgtagacggggacatgtcacctatcgattggaaattgagagcattggggtaccgggaagatcagaaggaaggaggacgttttatagcagatatagatggcattcgtatccctattgactttctcacagaacacgtccaccccaccagttcgatagaaatagccggaatcagagccagtaatttgctgggcgttaaacgggctatcgagtcctcccgcaaaatcatgtttgaagttccggatgaagagggggaagccatacaggttcctctgcgtgtttgtgaagcaggagctttcctgatgcttaagttgcgggcgtttcttcatcgccgccaacccaaggatgcctacgacctgtactacgtcatgcgttactacgatgggaaacatcaggatggctggaatattttccaacagtttgcattcgagaagaaatcgggcaatacggcaacacaggacgcacttcaatgtctggaaacctattttagcagggaagaagacgaaggtccctccaaagctgccgattttgtggggacacacgtttcttctgaaatggctctggaaattcgtcaaactctcgtgactgcggcagaggctttgttgcgttgttaatgaagcaattttcagtaaaagaggtatcggaaagagttcttgcgagtgatttcttcttatccactgtctgggaatatctggtttgtcaacctcagtacgacgagggagcgattacaaggggagcatttatcctctcattgacaaagttaccgttgaatattcttcacgttcgtcatcaattttagcgatttttgcacacttgtttcattttgagctgatttttcctgcaattctcgctaacttttctctattcgatcacatggcttcttttctgtccaaatagtttgagactgtccctgtcaatacacatacccttaagtctgcgcttaaggagtacaaggctcccatggtcaaaatatccctcctgcagagagaaggcgtcattctcaatcttcgccgggagatttacctgtgtcttcctgaagaaggggagggcacttattctcgtgaacttgtcgcgaaccatcttcttcattcctcctatgtttcttatgaaacggtattatccagggcaggagtgataccggaacgggtggctcttctcaagtcctcctgcatgaagcggagcaaggtgtttgacaatgcgacaggtcgttacgagtacacattcaggcgcccgaggcttattttccgattggcctgacccggcaaaagacggaagaagggtatttctacctgacagcgactcccgaaaaagctttgtgcgatttgattgtctcttcatccaatcttcacattcagtcgatgaagaccatgcggtcttatttgaatgagtacctgagagctgactgggacatgatcaccgggatggatatctccattatccgggcatgtgccgaaaagacgaacaagaaaaagaactaattgaattttctggaaaggacgatgtcatgcctttcatcaaagatcagaatacgcttaatatctggtcgacagagtacttcctgcaattagcggacatggtgaagttgtcctaggaaaatactcaacctcattcgaccaacaaaacccttcttgcattcgcttgatttactccatattcggaaatttactaatgcagtgaattctgaatatagagtaaatttccaatctcttaaaaagacataagagggcagattttacacctgcgaaaaggcattcaaaaagggcttgcttctgcacgtttggtagcctattggtagccgagaggagttaaaaaacgtttattattgataatcaatagtaatgcataggactaaggatctagtggtgataaaccgtaggggttcgagtcccctcccgagcaccatcctctttcataccgcaagttgctggtttccagctcttgcggttttcgtttgccgccggcgggaaaataagccgcaacacattttttatcaacaggggagggcatgcgctataaaaagaaaggcattttcccacttccggccccccccgaactcttacttgccggaaacaatccggacgtaatcagtaaaggattggcccttacggcatccgttaaaaaccctccgccatcagggccacggcttcttcacggctcggcatggaacggatggctcccttgcgtgtcgtcacaatggaagcggcggcattggcgaacaaaagcatgtccgccaactggccttccgtcaggttttccagcccggtttccagaatccggtccaggcagcatcccaaaaaggcgtctccggctcctgttgtgtcaatagtcttgacgttcaagtacgtaggctggtgaataagtttgctttcataggcagcccagcttccttttctgccccccgtcaccagaataaggcgcaaattgtcgaactccctctgcaaaatcctcaatccttcttccatggtggcgcagccggtgaggaagagaagttcctccatttctattttcatgacgctgcatgcgccgcatccgtagagcatttgttcccgggccagttccatatcaggccacaggggcggacggagattggggtcaaaagagatgagtgctccttttttccgcgcatggctgacggcatgccgggtagccctccgaacatcatcatgcgtcatggaaatcgtcccgaaatggaagacgcgcgcgtgctccaccaattcaagggccacttctcccgcagtcagcttcatatcggcgccgggattacggtaaaaggaaaattcacggtctccgtgttcgtcaatctgaacgaaagccaacgtcgtattgacttcccgggatgagacgagccctgaatctccgatgccttcttcctgaagcgtgcggcgaagcattttcccgaacatgtcgtggcccactttgccaataaaggaggttttgcgcccgagcctggacagcatggacaggacgttgcagggcgctccgcccggattggcctgataaacgggcagttcccggtcatttattccgcagggagtgaagtctatcagcaattctccgagagctacgacgtcatacatgcttttgcaaatgttgaaagtgaaccttccggcgaaatataaaccgggagagataaagaagcatagaacgcgacggccttgcgggaaaaggaaaaagagattcattccagtcatggcggaaaaggaatttccccttttatcccgccctgcagaaacctcgaaggttgatggagcatccggatgtgaacaagtatggcatatatccctaacgccctccactcaggaaatgcccatcaagatgagacggcaaaaacagtgctgcgcgaggcacgcgcggaacgcaggagagagtgtccccaacggggcaaatgcccccttacgggcatttatgggcgcgacttcttctgctccctcccattcctccgcaacaaacacgcattttcaaggcatttcaagcttctttaagagaattcaacccttttcaagcatgtgtgatggtcacagtattccgcatttttcttcatgattcccttcccatcctgtaatatgcgcccatgcaagaaaaaagcagcggctttcaatggcccgcacagtggacccccgatattctcgccacgttaatgttcgtggtgcagaaaggaaggattctcctgatacgcaaaaagaggggaatcggtgcgggcaaggtgaacggccccggcggaaagtttgaaccgggggaaacggccctgcaatgcgttttgcgggaagttcgggaagagcttcacattgatattgaggatgcccgggaaatgggcgtgctgaatttttcctttgcctgcggcaccattccggaaatccgctgccacgtgtttatggcgacgtcttttacaggcactcccacggaaacccccgaggcggagcccttctggtgtccggtggacgggattccctatgacctcatgtggcaggatgaccggttctggctgcccgccatgctggacgggaaacggtttgaggcgtttttcacgtttgagggggaccgaatgctggaattttccctgaaagcagaggattaaatcgccaagaaacccgaggttgcggcctcctccctttaagccggatggggaacgccgaacttttttattccgcccttccccccggaagcagcagattcagaaggagggggaaacagcaccgcccggcgctccagaaaagattccctgaaattcacctgaaggtggggggcaaagagggtgcatttgcccttgaagaccattctgaacagcagctaacgttgaagggccggcttccgaaaaaaatggaccttcccccttgtaccgggatacatcatattcatctccttccctccaggtatcctgaaacggatcataggaattgctccggacgccagcatcgcagagatttccccatggcgtccagaaaaaggaaagttctccctgccggaaaccagttccggcttgaggttcatgcgaagggctggaattcagccaaatccgcggctccgtaagaaaacggggggatggttgcataaccggaccggtaatggaggtttaagggagcaaatcagctccggcctttattttttccaagcgcatccgaatatccactggtgcatcaaatcccttttccgtaaacgggcgtgggcttttctttttgcccggtatccgggaaatgctgatttttccgatgttttgccttctttttcaggtaatgcgcggatgcctgcgcccttgccgcttttttactttgcacggggaaaggacggctcccgcctccgggcatcaggccgtattctttaagcttttcctcccgcctccgttgtgataatgatgcgggagcaaccgtgtgatccttgatcgttcacttgctgactatttcaattcatattccattattcaacatgtatacccccgaattcaaaaacatcctcacttccaccctggacggactgcgtgcggaaggactttacaaggaagaacgctttatcgcctcccagcagtactcccaagtgacgctgaaggacggacgctccgtcatcaacatgtgcgccaataattatctgggccttgctaataatccggaagtgatggaagccgccaagaaagccatcgaccagtggggtttcggcatggcgtccgtgcgttttatctgcggcacgcagacccttcaccgtcaattggaagaacgtcttacccaatttctcggcacggaagacacgattctgtttccctcctgctttgacgccaacggcgggctgtttgaaggcctcctgactgcagacgacgctattatttccgattccctgaaccacgcttccattattgacggcgtgcgcctctgcaaagccaagcgcttccgttatgccaacaacgacatggcagacctggaagccaagctccaggaagcggacgccgccggagcgcgcgtgaagttgatttccacggacggcgtcttttccatggacggcatcattgctcagctggacaagattcacgagctggcagccaagtacaatgccattgtccactttgacgactgccacgccacgggcttcctgggcgaaaagggccgcggcacgcatgaataccgcggcctgttcggccatatagacatcaccaccggcaccttgggcaaagcactgggaggcgcttccggcggctacgtctccggcccgaaggaagtagtggatatcctgcgccagaaggcgcgcccgtacctgttctccaacagcgtggccccggctatcgtagccgcttccatcaaagtgctggacctgttggaacagtccacggaagcgcgcgaccgcgtagaagccaataccaagtatttccgtgacgccatgacgggagccggattcaccatcggcggcaaggaccaccccatttccccggtcatgctgggggatgccgtcctgtcccagaaattctccgcccagcttctggacgaaggagtgtacgccgtcggcttcttctatcccgtcgttcccaagggacaggcccgcatccgcacgcagatttctgcggcccatacccgcgaacagctggacaaggcgattgaggccttctgcaaggtaggtaaaaacctgggcgttatttcctgattcccgcgctttccatggcttcggacgcatcacccatgcccggcggcaacctgccgacgctgcccgtcaagcgggtggtgcgtcccactccctccattccggaccatgaagttgtgcgccagatagggagcggcgcgtacggagaagtatggctggcaaaatccctgaccggggcgtggcgcgccgtcaaaatcgtatggagggaggattttgaagacgagcgctctttcaaccgggaatttgagggcattctccagtatgaacccatcgcccgcaaccatccggggctggtccatatcctgcatgtagggaggcatgaccaggattccccgttttattattacgtcatggaactgggcgacgacgcccgcaccggagttcatattacaccggacgaatatattccgcgcacgctccagacggacaagaagttttccggcaacaagcctcttcccctggattactgcctggaggtaggcagccagctggcccacgccctgctgtacctgcacagcaagaacctgacgcaccgggacatcaagccggcgaacgtcatctttgtcaacggacgccccaaactggcggacataggcctggtggcccatctggaccagcgcagctttgtagggacggagggattcatcccccccgacggccccggcacccggcgggcggacgtttacgcgctggccaaggttctgtatgaaatcagcacgggaaaggaccgcatggattttcccgaactcccggatgacttgccggaaggcaccgtgcgcaagaaatggcaggccttcaacaccatcatttgccaggcggcggaaccccgcattgaagaatgccccattgattccgcagaggagctggcggaaaaaatagacgtcctccggggatatgaagttccttcccgttttcgtcttcagaagaaaaagaaacgccgcaaactcagacgggctcttcagcttctggctgcagccgtcgccggagccctgactgcctactggggggctttatggctcaacaacagccagcatccgccggaggaacctgcctcggatattcatccggatatccaatcatccgctccggaagaagaatcccggaccggatacgtgctggtgaccagctccccggcgggagcgtccgtgtatgatgcggacggcaactatctggatgaaacgccctacggccccattgaactgccttccggctccccggtagcctataccatcaagaaatcggggtttgcggacaaggaagaggcgggaaccgtcaaaggagggtccacgctggccctgggcggtgtgctgaaggagtaccatccccctacggacagccagccctggaaggatacggagggtgttacgtacctgcccgcagaaacacgccatgtggcgcaaggcccccttaccgccgccctgttcaacaaatttctgagggaagaccgccagaaagggaatttccagatgaaaagggaacagacggaaccggggcatccggagaaggatgtggccctgctcacgcaggacggcatcacggcctacctggcatggctgaacaagaaatgcgaacgggaggggctgctgggcaaggaattttccatcaatgcggatccgcttccgcaggcttccggcagcacggaaaatcacaatgcctacgtcctgaacgtcacccgcgtgttccaggtgcccattaccgtcaccaccaacccgccaggagccagcgtctttttcaataacaggctcatcgggcgtacccccattgaagaatacgtcaaccaggttccctacgtcattgaaatcaaactgccggggcacgccaccatgcgccgcagggggctggatccgcaggatttatacctttccctgcagttagagccggacaagtccgtcgtctttggctcgccctggactaacagcctgggcatcaaattggttcctgtgggaggaaatgctctggtcatgacccacgaagtgcgcgtaaaggactttcaggaattcctgaaagctaccggaaggaaagctccggcccggcccggctttccccagggagaagaccacccggtggtgaacgtcagcaggcaggatgcacgcgccttcgccagatggcttaccagcaaggagcgggcactgggcttgattgatcagcacgactcctaccgtcttcccaaggatgaggaatggagttcctgggtgcgtctgacggatgaacagggagcctccccctatgaaaagacgctgcctcatgaaaactcccgggaagccttcccgtgggggtattcatggccgccgcctgataaaacgggaaattttgcggatcagtccgccctgatttacttgccgtcctcccgcgttatcgtaggatataacgacgggcagccatacacggctcccgtaaaaacctttccgcccaaccacctgggcctgtacgacctggaaggaaacgtcatggaatgggtagacgattcctatggggggccggaatctctccccatccgcaactacggcgtcgcccgcggaggcagctacctgtccttccgccccaaacagctcaccacttccatccgcactcccctgccggaaaatacgagggataacgcgctgggcttccgtcttatcctgtcttccgaacgccccgccattccaacagctccctgacgccgtatctgcggcagcgtttctcccccgctcttcccctccctgaaacacaccgccccccaagggagaaagccctgaggcttgagagagcttccggctctccgggaaaatgattgaaagggcctcccgttatgctaccattttcccgcatccttttcctgaatgaaaatcatcgccatcgccaaccagaaggggggagtgggaaaaaccactacggccatcaacatggccgccgccctggctcagctgaaaaagaaaatccttgtcattgacctggacccgcaggccaatgccaccagcggcatgggcattgacggaaaagacacgcccagcctgtatccggccctgctcggccagcttccggcggaagagtgcatcctgccttccggcaggaaacggctggatatcatcccctccaccatggacctggccggcgtggaaatagaattggcccgttccggcaaccatctgacccgcctccgggaaacgctcgcccccctgcgggagtcggacacctatgattactgcatcatggacacgccaccttccctgggcgttttaatgacctccgccctggccgcctgcgacgaagtgctgactcccctccaatgcgaatggttcggtttggaaggactggccaagattctgcacgtgacggcgcaaatctgcgccagcggcgtcaatccccgcattcggcatgaaggagtactgatgaccatgtatgacggccgcaccaatctttcccgccaggtcatcgaccaggtggaacggcatctgccccagatgctgtacaaaacggtcatcccccgctccatccggctgggggaggcccccagtttcggccacaccatttttgaacacgatccttccggagctgcggcggacgcctacctgaaagcagcccgggaattcatcaaacgccataaaccctgaacatttggagaaacaagcttcccggaatgccgcaaacctctgcgggaggaacaggcagaaagggcaccgcagaaaacttcctccttcattttgccttccgggtttgttgcgtccatttaacgtcaggaaaacctcttccataccgcccccccggagacgaaggaaaacaggcattccccttgacttgacttccgcggcatataagaatgctccagctccgtttcaggaacttttcccctcatgccagcagaagaaggccagccagacgaccagccccgggtgacagggcaagtcccgcctcccgctccgacgacaggcctggaacagattctgcccggacgtccgcccctgccccatgcggaagaaaaaggggcctttttcgtttaccagcgggagctggctcccggcacgcgcctggaacaatatgaaatcatccgcgtcctgggcagcggaggttttggcatcacatacctggcgaaggatctgttcctgaaccgcaacgtggttatcaaggaaaacttcccttcaagatactcctaccgggaccctctgaccgggcatatccggcccaataatgaacacgatctggaaaattacacctgggctctgaaaagttttctgagcgaggctcagacgctggcggagctcaacaaccccggcatcgtcagaatcctttccgtctttgaagccaacggcacggcctacttcgccatggagcatattaccggcctttccctggattatctgggggaaaaacttcacagcaccgggcaccggtatacggaagacgaactcaaggggctgctgacgcgcctgctccggattctggactatctccattcccggcacatttaccaccgggacatcaaacccggcaacatcctgctgacggaggaaggcacgcccgtgctgatcgacttcggagcggcacggcatgccctgaaacttcatgccgccaccgtcctgaccacccaggggtattcctccccggaacaggcgctgggcaaaacgaatatcggcccgtggagcgatctctattccgtaggggccactttttacgccctgcttacaggaaatcctccggaccgcgcggaagcgcgcctggcggaagatgaaatgcagccgctgcacagcgaccccgtgctcacccgctattactcacggcagttcctgctttccctggacaaggcgctggccccccagatcaattgccgctaccagactgccggcgaatggattcacgacatttgcgccatttccggggaagaatcctccgccactattcaagtcctcccggcagaccgccgccatgcccatccggaaggaatgccaactcccggcgccgggaaaaacatcggcagcagaaaggccgccaccggaacggactgtcttcattccgcctcacgcaggcagtccgcacgcgctcttcgccgcaaccgccacatgatgtccctgctggtaggaagcgcatgcaccatcctgctgggagcgggagcattttatctgctggattacatgaaaaaagcccctatgggcactaccatcaataccatcaaggaagccatccagcagcctgcggcaagctccagcgtgggagaaccggaaccgccgccacgagatctggcatccatccgcattccggaactcaaaataacggaagacgcggcactggaaccgcggtcgctgacggagttccgtttgcgccttgacgacaccatcctgacccgttccgggcttcctcccatcctgccggaaaaactgcgcatctcctgcatttatctccaaatcattcccccggcagcaaacggggaaaaactgtacctcaccatccgggattccaacggcgtcctggtggaccgctccatcaatgccgtcccctccttcacggtgccggggcaatccacctccaccttcttctttcccgcgctcccggaactgtccacggaccgcacctacacgtactcctttgaaaatgccgcccaccaggccgttcccatgcaaatggcatgtttcaaaaacgagacgaaacgcacggaggaagccttcccgaaaatccgtttcatcgctgctccccccgtaccggaaccggccctgctccatgacccggcctacaaaaatcttgtggcggcaatcgccgcgccctccccggagaacaaaaatattctcgaccaggcaaattccatgccgggtatgctgccggccctggagcaactttccaaagccggctacccgatagcccagcaggcactggggaaaaccctcatatctccggactgtcccgacggttccaggccggaagaaggcgtggaatggctttaccgttccgccacaggagggtgctatgaagccatgaaggagctgggcattctgctcatggacatcccctcctactttccccgccttccccagcagcctccccttgcctcccgggattacgcccaggcagcgcgtttcctgagaatggcggtccaataccgggaccaggaggccctgtacctgctttccctcatgtactcccagggctggggcgtacccgcctccccggaactttccagcctgatgatggaacgcctcaatggatcctcctactccacggacagcctgaatcccaacgcgcctatcgcggcgtactggcttccccttgccggagaaaaaaacaccattctgcgcttcactattccagggccgttcgccccgtcccagctcaagggcgttactctgcacaatacaagcctgaaggatgccttctccatcagtaaaatcaatattctccaacatgggcgcctcattctggacatcatttccccccaggaagtgctgcccggcaaaagctccgctcccataggcatatccatcccggaagggctgctggcggatacgaccctgcctctggaagtggaaattttgctgacccccggaaacagctgcggcgtggtggaaatgccccctccggtggaaaagaaaaactccggaattgaaatcaattaagcttcaccgcttttcaacgcgaaacaacaacaggggaaacggaaaacacccttgattcccgcctggggcatgctacaaaggataaatgaatgcccctgttttcctgcggcgcatgctccctatgctggccgcgttcctgatggtctcctgcggtgatcctaccgtctcctactggaaaaaggcggcggacatcaatacggaatactcggaaaaaagcgacgtactggtgcaacgcctcctgaaactgaaaaagaaccctacccttccgggcctggaagaaagcagcagggatgcggctgacctgttgcgggaaagggacgaagaactggcggacctgagcacgaaaaacgtggatcccgccgtgacggcctatgtggaagaagaccgcaagctttttgccagaggaatggaattggcggaacgctaccagcaatactttgaaaaatatcttaagggaggaccggattttactccggatccttcccgggccgtcgcccatataggccggggccggcaggaaatacgcaaaattctggcagaagcccgaaaactggaagaacgggctgaaatgctgagaaaagaaaaatcagctgagcttgagcaagaacttcctccgctgcactttcgccttccggagttgaaacaacttctatccagccgttagaaaacgcgtacgaaccatttgcatcaatgcggagtcaccgccagtctgacagcggcctttacactgcacgggcggacacaaccggctcctgaaactttccccgtccatgttacggaaatatcccttccctggatttacaggaaaaacgagtccccctgctgtccatcgtcgtttatttcagcattcaaatttcattccctgaataccccttagcacaggcttcatagtttaaaattccaaagaaggggtttgcctcccctccacaaaaaagccccgttcatatttcatgaacggggctatattaatttttcaaattcacctgggagtttgatcaatgacgataaaatcctttttccccacatactccctccgggcatccggatctccatatccgtcccggaaacgtacttccaattcgtatattttcccgctggccagaggttgtaaacaggtcagcagcaggtatgcatccttgacaggcacttcatgtttctctccggggtttagagtaataaagcgcataagattcgcgacacgctccatttgataggagggaagataccatgccgttggcctttttcccttctttccgtttccctgactccatatcttgatgatcatattcggcccgcgttccttgagaggatagaagtcgtcgaaaagacgcacagccttttctcccttattggcaaacaccagcttgaagtccggaaaaacggctcttggatcgaacgaagccttttccatcaccacggaacattcaatcccgttatcggccatatccccccatgcaggagcatggaagaacaggctggccaaaagccctaaaatttggaagattttctcattgcagcgcgagcttttgggagaaggcgagaattcgcgcttcatcgtcgagttcccttcgtacttcccttcctggataggttccctgtccatcgtgacgttgaacgcgaccgcattgccactagagggatcgtaagcgttattctcatactttaaagccaccttgtaataaaatgtctcactatctccagggcgattgatcgaccacggagaaatcttttcttcctacatacttcctccgaacaccggaatctccatatccgtcacgaaagattacttccaactcatatttctcaccattgcgaagacggcgtgaaggcccaaaatagtgcatcaacagatacgcatctttgatgagcacttcatgtctttctcccggcttcaacgtgatgaagttcaagaactgtcctcgctcaatgcaataatgagggtaatatgctgctaccttttcctttttctcttttgtcaatttccaaaaaatctctatggaaatatgcggaccgttatccttgagaggatagaagtcatcgaaaagacgcacggtcttttcgcccttgttcgtgaacaccagcttgaagtccgggaaggcagccctcgcgtcaaattcggttttttccatcaccacggagcattccactccgttgtcggccatgtccccccatgccgcggcatggagggacaggcttgccagaagtattaaataccggaagatttttttcattgcagcgtgagcctggccgttgcccggagaacccccaggaaacaatccttaccctgctgattatagtagcgcgtttcgagttcacaagaacattgtttccagccttccagatcgacttcatccagacacaccggaatcgtgacgctgtattcctgaccgggtgcaagctcccggtagttcaagggtcgctggaaggtcatagtgccaatttccctgttcagaacgcgcattttcccctgttgcgtcctcaacaccgtcacgaaaaagaaatcggacgtttcgtcgttgatttcgtccggaatccggacaggctcgtttccttcgttgcggaagcggactgtgattttgccttccgtgaattgggaagtatccgccatggagagggtcaagggcgccggttcctccgcaacagccatgctgcgggtttcaccttcgctgaccggaggcatgaaacagggaggctcgatcgttccaggtttcgtgataaacctgggcacattgttccaccccatcgcgtcggccagacgaatgacataggcggttgcctcgttcagggcttcctgtccggcgcaatagggtctgtcattggcatcatccggcaacgccagtacataggctaatgtctccgtccaaagatccaatgccatttcattggcaagagcctgcatgaacttcacggctttatccatgttcggttctttgtcgcaggagatagtctgattttcaagcatttcctgtattttggagtccttccagtagaacttgtaggcatcctcccattgacggcggtggtgttcttcgtgggcgagggaagcctgcggcgtgtgccatgtgcccactcttccgcgggtctggtaaccgttcatttcgttgaccgcttcggtggcttcttctccattgagagggggatcaacatagggattcacgtaaatgccttcatacatagttagcttggctccggcagaaacggaaataacacgacacctccatacgttttccgattcatctttgcaaaccgttacgcaaatcttaggtctcaagctacttacattgcagccaccattcccttccaaatagacgggttccggtttctcaaattccagttccacttccttggatggctcacaggtgatagcggattccttctcaatcgtccacaatttgattttgggggacggcgagaattcgcgcttcatcgtcgagttgccttcatacttccctgcctgaatgggttccctgtccatcgtcacattgaacgcggcagcgttgttgctggcgggggtgtaggcgttgttggtccacgacagggccaccttgtaatagcccgctttcaggtacctggaatcggtttcaatattcagtttgccgttgggtggtgtcccatccttttttatagcttgctcaccggcaatcgtcaggctgcctgtgtcgtcggcttccacgccgaaataatacaggccgtcttcctcgaccttgatgaacatttccggcgctccgacacaggtggcataatccgagggagttccgtcaaagccatatatcatttcatcaacgccgagcatcttgctgataagaggctcatccccttgataaatgcagacgggattaactgccttgttgattggtatataattgttcattgctattgttgttgtttactttttggaaagactgaaccatcagccttccggtattctggcggcgttccctgaacccatcaacacgtttaacgcgtagtcccccctcattcggaacgaagaggaacgacctcccctctaattttacgtgctgccgtgaacttgcaaaaaaactcctggtgcgtttttatatcctgattcacgccattttggaacaaagttgctccatatagatctgacaacaggcacgggcggcattccgccgcacaatcatgatgccttaaaaaacaagcattctctccttctctgtccgttccgccaaagaaaaaggctgtttccagagagtccttcacttaaaaacaaagcatcttttccaaaaacgagattgacacccgcggttcttttccctagtatccgcgcacagcatcagcggcggggtagccaagtggtaaggcgacggtctgcaaaatcgttattcgcgggttcgattcccgctcccgcctccaagatgttgtcaaagccggttcaagtcgcgttcgtctagcggtccaggactcccgcctttcacgcgggcaacacgggttcgagtcccgtacgcgatgccagcttttcttttttccgacttgcaccggaatcttttttatgccatccccgcgggatgattctggattttttctcctgttgtggtacagtagcttccgtcatggcagcccagaacgatattatgctgaacggatccccgtacgaactggcggaaccctgttccgtctcccggcttctggaacttttgaacatgaaaggcaaacccgtcgtcgtggaacacaacggggccgcgctcctgccgcaggatttttcccgggtgacggtttctcccggcgaccgggtggaaattgtctccatcgtcgccggcggctagggttccgctttctggaacagtcttttccaatccgtcatcgccatgccatccatccacgtcatgtctcccacccttgccagccaagtggcggcaggagaagtagtggagcgccccgcctccgttgtgaaggaactggtggaaaacagcctggatgcaggagccaaattcgtacgggtggagatacgccgcggaggcgtgggcatgatcaaggtgacggacgacggcagcggcatgtcacgggcagacgccgagctgtgcaccaaacggcacgccaccagcaaactttcttccctggaggagctttttgaaatcacacacctgggattccgcggagaggctctgcccagcattgccagcgtttcccgcttcaaactctgtaccaggcagcagcaggatctggaaggctgggaaatacgcattgacggcggcctggaacacgaaccgagaagctcaggcgtctctcccggcaccgccattgaggtggccgacttgttttacaatactccagcgcgccgcaagttcctcaaatccgcagaaacggaagcttcccatgtggagcaccagatacgcctgcatgccctggcttatccccaagtacggtttgcctataaacgggacgaccagcttgtttttgaccttcccgccacagcggatctgcgcgtccgcatttccgcactgacggatgctgccacagcggcggccctgattccgatagaaacgaccatcggccccggtatttccatcacgggattcctgcttcctctttccgaagccagacgcaccagaaaagggcagtacgtctttatgaacacgcgccccgtggaggaccagctcattaacagggccattcgggacggctatggaggcttccccaccggactgcatccggcgctttttttgtatatggaggtggagcccgctctggtggacgtcaatgtgcaccccgccaagaaggaagtgagattccgccgttccgcagacgtggtaaataccattgtggaagccatagccaacactcttcaaaagcacgcccggcaggaaatccacgctgccgccgcgccggagccggagagaactcttcctcctgcccattctaccaccgcgccgtatggggaaatacccgcccgttccaccaaccccggttctgctttcccggcggccgccagaccggcccctgcttcttccgccgcccaaccgccgctttcctcctctgccagacaatcccatgggcctgtccctccccctaccctccgggccattcccttgaaacaggttcccgccacccaggggaaactggattttcaccgtcaggaggatgaagaaacggcacgaaacgcccatgaaaacgcagcttcagaaagggatgcctccgccggattttcctatctgggaacactccgccagcaattcgccctgtttgaaacgccggaaggcctggttctgatgcatcccaaggcggcccgggaacgcatcatatttgaacggctgcgcgcacgccgggaagcccccatgccgtcccagcagcttctggatccggtggtgctggatctggacccgcgggattttgccgtcatccggcagttcgccccgcattttgaccaggccggcatggtcgttacgccctttggacagaataccatcagaatagaatccatccccgcactgctggaactggaaaacgcacgcgcttttctcctggagctggtggaccgtctcacccattccgaattcagccgaaatgccaaacgcgtggcttatgagaccttcattggggaatttgccagaaaatccgcctggagggagcgcatttcccctcaccgggcccctgccatcctaaaggatttgcttgcctgtgaagtgccgtactgcaccccggggggcaaacccacgctggtgaattattccgttccggaaattaaacgtaaattcggcctacaggcataagggaaccttgttttccagaaaacaggctgaaacgctgcaagattttacggcgaacggaaaatatgcagccaaagacggattgatgcccgcttctgcggtatattattttcccttaccgatactcagttttatttcagccgcagtaaggggcagaaactctccctggcaacagggatcattttatcctgtccggcttacggacaccttttccgtcttgtccgccagaactctggcatttggacgcatcctcccgcatacaacagggagcttgctcttggcaaggaagtttcccgcgtttatactgcagccttccagataaattcccaaccatgccagactctccccccagcacctcccccgctccgcgcattgctgaaactgccgccgggaaaattctggcgggcctgctggcccttttttacatcttcctggcaacgacggcggcaggcggggaatggcacacccttttccttcccgcctgctttctggcggcagccctcctgctgttctgcttctgtattctccggggatacaagattcccagccccggactgccgggctggctggccctgggtctgggaggcggctatttccttgtccgggcatggttttccccctggttttattatgagagcgtagcggatctgggccttatcgccacggccatcgtcatgttcgcggcgggaacgtatgccggagccggaaacggggaaaagagtattcttcccgtactggctgcggcattggggctgctgaatgccctgctgtgggggtatcagaacataacgggaacggaagcctcctggttcagaccggattattccctgttcggcacggaaatccgcaacatcggattgttcggatacaaaaatttttccgcccatttcctgtccgtcaccggttttttcctttgcgcatacagcatggcttccgccagaaaatggggcatccgcctattcacaggattggcgctcatcctcgtttccttcacgtgcggctcgcggtccgccttcccaaacgccctggctggcgtaaccctgtgcttctttatttatacctccagcgttttccgcaataacagaaaattttacacggcgtccatcctctttattatcctgcttttcctaggcacgtcctatgccgtgctggatttgtcccggggggcgggcaggcttaccgcccttctggatacattttccttcggcaaccggctggacctgtccaaactggcctgggcgctggcggaccaggctccgctgttcggtcacggcagccggatgtacaccaatctttccacggagtttttctccggagccaacctccccaattttgcccaccacgaatacgcacaagccgcctgcgactacggctatgccgggctggggctgatgctggctctgctggccctgtttcttatttccggactccggagcgttctgaaattgtcgggagaacatcaacggcccaatcccctgggaccggcggcgttctgcgtattgtgcatcgccgctttccacgcctatggggaattcatctggcataaccctgccttgcttggagccagcgccctatgcggcggcattacctgcacggcccctctttccagggtgaaggcttcgcgccgagtcggccgctggcttcaagcgaccgccgcactgctgatggccatattggctctgtgttatgcgtttctggcttttccggtctggaaaaactcccttcaagccgtcccggcttcctccagcaatcggctgcccatgctggaagcagccgcctcctgcagcctggacccggatttggtgcggcgcaacattctgcatgccgcaggcagttctccccccccaagcccagcccggctcaaagtattggagcatcaggaagaaaaagcggaacgcctgagccccgggaaccacggcctgacggcggctaaaagcctcctttacatcctccagggacgcctcacggaagcggaacagctgctccgcccgtacgtagagagtcccggcaggtttgacgaccgcatgttcgcctggactaccatttacaataatatgctgtattcctggagtacggccattgctgcccagtccccaggacgcgccctgtccatggccatgacggcccagcgcctgatgtccgcccaaacggaccggtggctgtattatggggccctggatcctgaagtcaggaaaaaacactactcgcgcctcaatgagctcaagatgctcatcatgatgctccaggcccgcagaacgacgcccgacccctcctggaggaaatagtattccggagaatcggggaaaaggaatctgtgcagcaaccgttatatcctttttccagagaagccgctccatacagaagtttccccgtcttatccggtttcttttttaccggattccacgtcagcttatttgtccacggaacacagagcgtactgcagccagaaagatgaaaagccgatagttggcgcagcaagtccgcacaggcgttacgccggaattttaagcggattcagctatcttccgccggaagcggcagcctctccggaacagaatcgtttgtttctttttcccccaatcgcggactgcctcggttggcggtcccgtaaaacgcatgtcccgacgcagctcaacagaaaaaaactttcccggctctattcctttatcgaatctttttgtatgaacataaccatcaaacgaatttatgaccccaaggaacccggggacggataccgcgtcctggtggaccggctctggccccgcggcatttccaaggaaaaagcttcctgggacgagtggctgaagaacatagctccatccacggcgctccgccagtggtttgctcatgatccagtcagatgggacgcattccgcaaaaagtacgacgaggaactggatggaaacggagaagccgtttcccatctgctccggctggcgcggaaagggaaggttacgctgctgtactccgccagaaatacggagcacaacgaagctgcggctctgagggattaccttttgcaacggtttgcttcataaatagaagcatattcctgcacaaactccatccgcaagccccaaatgctgtcacgggaacctatgatacggcaggatttcttctctcgttcatgaacaagcgaagaaaatggaaaggaggtgaatacaatatggccagcagttcccacatgggtggaagtcataagggcagttccaaaaaacgctccgagactaccacaagcaaaaccgggcggcgcatcaaacgcgatgcttcaaccgggcagtttatgagcgataaaagctcaggctccaaggaaaaacattaatgcccgcgagtttttcgcctgattcaggctccggatccggtccggagcctttttatttttctccgcatccggaacacgaggaagtcttccgccatccactcaggcccaattcttcaaaagcccgaaggcccagcgcttcaggggctttccggtctccgcgaatcacaacggcaaaaggctcttccctgcccggaacgtaatacgcagcccgcagaaccagttcctctccatccggatgggcgtaaacacccacgggcgtggaacagttcgcacccagacgcaccaggaaagcccgttccgccagcgcacaggcaaaagcttccggatcattgattcctttcagcatttcctccgtctccctgtccgaggaacggcattccattccaacaatgccctgccccacggcaggaataaaaacttccaccggcagggaacgcatgtaaagttttcttccctccacaagggtttccggagcgtacagccccaggcgctccaaaccggccctggccagaatcacggcatcccagccgggctgttccaccagttttcccaaacgcgtgggcacattccccctcaggttttcaaatctcaggccggagccccagtatgtgcgcgccatcaggcgtcggcgcacgcttccggtagccagcgttccggaaccgttccagtccggttctttcgtgataagcacatcctccacggcagcacggggcaagacagcggccagcgtgaagccggaagcaagctcgctcggcacatctttgaggctgtgcaccgctacgtcaatgcggccatcccggagggcggtttccagttccttaatgaagattcccttgtccaccatgccggaaacgcgggccacatccgccaaaggaacatccgtgcggcgatcgccgatggtatggatgatttcacggcgcacgtccagttccgggtaacggagggaaagggcagcacagaccatatccgcctgggccagggccagggcgctcccgcgggtgccgatgatgagggtatttttactggtcataaagagcggaatccggaaaatatctggaaatgctgtcacggatgatggcctcgcaccgggagacctcctgctcccggctgcgcttggcctcatccgccagctgggtgagggtgtcaatgtcgtagagatacacttcctcaatatccgccacgtccggagagatgttgcgcggcacggaaatatcaatcaaaaagagggagcggtatttacgggaggcgcgcaaaggcagcagcgtttcccgggtgatgatgcagtggggagcagcggtggcggccaccaccacgtcaatatccctgagatagttcccccacacgtcataccggatggcctggccgccgatcatgcccgccagctctaccgcacggtcaaaggagcggttggccacataaatgccctcagcaccccgggcatgcagggcacgccccgtaacgcggctcatctcgcccgcccccagaataaggacgcgggtgccggaaagatccccgaaaatttgttccgccagctccactgccacggatcccacggaggttgccccggcatgaatctggctttccgtccgcacttttttaccgatagtaaaggctttctgaaaggttttgttggcgcaggccgcagttattccggcatccagagccgtatggtaggccgtttttacttggccaaagatttccgtttcccccagcaccatggaatccaggccgctcaacacgcggcacagatgccctagagcatcttctccctgatggctgtaaaaataagaagccatatccagttccccgcgcccatcacccagaaaatgggataaaatgtgctcctgcgcattttccggttcgttggaccaataataaatttccatgcggttgcaggtggaaagcacaacgcactggtccacaccaggaagggaacggatgcgctgtccttcctcccggagcttatgggacggcacggcaaaccgctcccgtatttccacgggagcggtccggtgattcaagcctaaacaaaccattctcatcagcttaccaggaaaatgctcatggatgcaataaagagggccacgcagcagcaggccaacatccttcccggcatgccgcggcggtaaatgaaccacagcaggacgctgtagcctgccgtgagaagaatgacaatggatgtcttggccgcattaatggggagatgcccccgccatccgaaccattccccgagcagaagaaggaggaatgccacaagaaccaggcgcttcatgctggcttccagtgtacggatgggaggaagcacacggcaggtgccgggaatccggtgtcttttaagacattcattctgcatgcagaacgccgcccccgcggcagcggccaggccgccggctccgtaggacatcatggctatgcccacatgcgccgtcacccagaagtcatgcgtgccctgcacgtccgctccggaacggcctatcagcagagaaaaaaccgtcagcacggcaatagccggagccgtaaagatgccaagcacggacattcggtaagcacgtcccagcatcagataaaagagattgatgctccaggaaaggaaaaagagcacctctgaagcgccgcggatgggacacattcccgcctggtacgctttgacgcatagcgcccctgtctgtagaacaaagaggcacgccatccaaagatgggcatataaaaaccgccggccggaagccagcaggcgccatcccagccctgtgaaagccagagaaaggatgagagaggcaacggcccaccagttatcgttcataaatccggcgcggaaatggttcaggaacgcaaatcgcgctcaatgacggcatatgcctggtggttatggatggattcaaaattttccgcttccacccggtaccagctgaaggcggaatgactctgcgttttcaacgccacgttgcgcaccagatcttccacaaagacagggttttcataagctttttccgtcacccatttttcatccggccttttcaggacgctgaacagggagcagctcgcgcaggattccaccaggtcaatcaggtcttcaatccagacgggcctggaggcgaaacgcacggaataagtaaccagcccgcgctggttgtgggctccgtaggcactcatggccttggagcaggggcaaagtgtcgtcacgggaacgataactgtcagcttgaaatcagccagtttgttgttcgcttccgcctccatctcaaaccggacaacgtaatccatgagcccttcaattccagtcacaggagcgtttttggagcggaaaaacgggaattccatttccacatgggaacggcgggcggacagacggcggagcagttcccgcggaatggccagggccgtatgcacatccagcaaggggccatgctggtgcaacgcttccacaaaacggctcatatgggtgcccttgaattcttccggcagatccaccgccagagaaaccgtcgccacggtggactggatgcggttgagcttgtcctgtatctggatggggaagcgcaacccttttacgcccacccggtcaatggaaatattgcgcgtatccgcctcggactgggtatctttcagttcctgcatggaaaaaaaggatgatgggtggaaataaaacgggagtctgccctgttaccggacaaactcccgcctgcaaagacaattctaccgaaagagattttccttggggcttgttacggcagaaggttgatggaacgggcccgcttgatttcacgggttatcttgcggtgcatcttggcggacagcccggtcacacggcggggaagaatcttgccggtttcagaggtgaacttggacagaaaatcagggttgagcagattgacctgatccatcgggatgtcgagacggcggcgcggcatctgacgattgcacgtgcggaaacgaatacggcgttctacagtcttgggttcagtggacataataataaagataatcgataagccgaaccagttaacgcatttcacgatgaagcgtgcggcgcttcaggaaaggattgtacttaatcttttccaggcggccgggagtacgcaggctttttttattgcgcgtggtgacgtagcgggacgtaggctttccttcggctttggcctcggtgcattcgaggatgatgatgtctcttggcatgatgaaaatgtgttacgggggaggatttatacactattcttcatcatcgtcaagagaaacagataaatctacatcattttgtcctccggcaaagcccagggccactctgggacggaacctggcattctggcctttttccttttcccactgggcctggcattccacggtaagccgcgcaaaggggatggcctccagacgcaggatgggaatgaccttgtatgacatttcgcagatgccatatgttccgttgtcaatgcgggcgagcgcctgttcgatttcatacaggccgtcctgctctttggaaagcaggctgagcgcaaaatcacggtcataggcgtcactgccggcatccgcctggtgctccccggagccggaagcctcactgccttccggatgattccggagagtatcgcgggccacgccgctcatgttgtccagagccctgtcgcgcaagtccagcagatgctggcgctgcatctgcacaaaaggctcccattcggggttggcggccagttcggccctggcggcggcaatggcttccgcctgttcatccgtcaattcatttttcgcgggagcgggaaccggggcaacaggagcgggagcggttttcttaaccggagcctttctggccgttttcggcgcaggcttcttttccatttcagccgcggcggcggcagcctctttggcgggcttggcggctttttccggttcagacgcctttttcctgcagcatttcttcttggcgggagcctccaggtctacagcggtcttgcaatcggacttcccgcaggtctttttcttggaagccggaacttccttggcgacggtcttgctattggttttcttgggagtaggcataggaggtgtctctatgggctgaggttgacaatatttcacgaacagagggcagaacccgccccgctgactagactatgagacattacaaacgcccaaatgttcattcaagaaaattcagttatgaaacaagtcatttttcccccttttgcaccctctattttcctgtcgggattttaccgggaacatacttcttttaaccttttcaacgcccgataaaattctatattggcgttatatgacagcttcaaccattccctccatcggcattgacttcggaggcacctccatcaagatgggggtcgtcaagggcgcggaagtaatcgcccacgctccttcgatagccacccaggaatacggcaatcccgatcaactgattgaagccatagcccagttcgtgaatatgctgcggctgaatcacccggaagtgcaggccatcggcatgggaatgccggggttcgtcaatttttaccaggggaccgtttatacgcttaccaacgtgcccggctggaacaacgttccggtacgggacatgctccaggccgcctgcggactgcccgtatacgtggaaaacgacgccaactgcatggcttatgcggaatggaagctgggcgccggaaaaggaaaaagacatctggtctgcctgaccctcggcaccggcgttggcagcggcctgatcgtgaacggagaacttctgcgcgggtctacctgctccgccggggagctggggcaaacgagcatcgactaccgggggcgcctgggccattacggcaaccgcggctccctggaggattatgtaggcaaccgggaaatagctgcggatgcacgcacgctttacgccagccacggcattgacaaggccattgtggactgcaaccccatcgctttggaacgggccgcattggcgggtgatgaagtggctgaacaagtatggcgggacctggccgtaaaactctcctgcgccctgatgaattgctgctatctcctgaacccggaagccatcatcatcggcgggggcgtggccaaggccaaaaccctgcttttccagcccctgcaggaaatcatgaaagcccagctcgccgcccctctggtggaataccttgaaatccttcccgcccagttcggtacggaggcgggtatcctgggggccgcccatctggccctcaacacccacttcggagaaacattccgggcctgatctcgtgtcttcatcccaaatactcagactcgcccgcaaactggaattgacggcggaacaggaacgggattttctggacgccatgcaggccgggaaccgttccagaagcgcgctggtcattacaccgaaggctccggaaggctaccagccgcccctgccggcaaaaaacacgccgcaggaatggggacattcctccattctggagctcccgccgggagagacagaaaccaaacccggctccctgccggattacgaatgcggctattactatccgctggatctctcgtccgtctgggaaacggcccctctggcgcatcttccgtttcgtccgggacgctgcctggacatgtgcgcggcgccgggaggaaaaagcattctggcgcaaacgcgggtatctccgcaggaacatgtttccaatgaggtgcatccgaagcgcctgggcattctgcgccacaacctgcttcgctgcggcttcaccaatctgtacacccagcgcctgcgcccggaccagtgggcggaactggcccccgggtgttttgacctcattctggtggatgccccgtgcagcgggcagtccctgctggctaaaggcattcccaaccccggctgtttcaattcctccgtcaccggaggcaacgccaagcggcagcggggcattttgctggccgccctccggtgtctggctcccggcggcttcctgctgtacactacatgcacctacgctccggaggaaaatgaacgcaatgtcctgtacctgctgaagcgccatccggacctgcacaccgtaaccgtgccggagctggagcatttccgttcctccctgacgcaggaagcctgctaccggctcatgcccttccacggagcaggagcgggcggtttcacctgtctgctgcgcaaggagggaggccatccgctcccactttccctgccggatgaattaaaggcatggcccattcatgccatgaattgctgaaaaaagatgaagataggcattttttccgacttgcacaaccgcacagaccatctggagccagccatgcaccggatgcgcctgctgggttgcggacatttcatcttcctgggcgactgcaccacgccggagagtttccggcgcctgattgaactgacggaggactttcctctggatgccgttccgggcaacaatgactatgatgtggaaaccatgcggcggatggccgacagttccccggcggcgcgcctgcatccggaacatgtccttatcacccggtacggcatgaaactttccctctcccattacccaaaatacgccttgcgggaagcgcgcagcggaaacgcagacgccgccctgtacggccatacccaccaggccgtgagcgaaagatgcggcggctgcctgctggccaatcccggagaactccagggcaggaccggacgcatcggcttcggcgtcctggatacggaaacccgcatcatcaacctgcataccctggattttcacgcatcatgaacacgctggacgtctgctgtgccctgattgaactgcccgccgcacgaggccctcttcttctgggcgccaaaaagaaaacggggcagtccaacgggcttctttacgaattccccggcggaaaagtggaaccaggggagaatgcccggcacgccgtcatacgggaaatacgggaagaactgggatgccccgtcttccccgtccgcatgctcacccccgtacggcaccgggagcctgaacgcattatccgccttatcccttttctgtgccgtctggaactttgcgccctgccccggcccctggaacatgaaaacctggggttcttctcccgccgtacgctggaagaactgccctgggcgcctgcggaccgccttgtgttaaaggaatggctggaagaacaccgctgaaagcagcatccctttcaaactcaatcgctccacgggaaagttcccgtccatgtctgaaaagattgcaaaaacaccttggaacattccctcccatgaggtatacaaggtggtggctgctgcactcgtcatcacctggcaaagtggcccggaccgatattacaacctaatgggggcagccccgacgcagggctgactacgtcctataccggaaaagtcaaaacagcggcggaagtccccgctctattgaggcacgggaacgtggctcacagccagagacggtgcagcggtgtcttttttccatcacctgaatccagaaagctcgttctttcaacgtttttctcctccttgaatccgcaggtaagccgggattcccctcttgggcaacattactcctgtcgggattcaccgcctttccctgttcttcccacccccgcatcacttacaaacacggagaagccaattccccaaaagatcgaatgggagcattttcagatatttcgtggccctccattcccgctccttccgtcactgggcgaaaaggaagaaaggaaatattattagttaataaacagcaactgttaataaacataataatcccttagacatttccggaaatcatgataggatcacgctccgttgcggaaaagtttttaacatccgtgcaactttttcattattgcgaagtataatatagtcgtgaagggattcatcaaactcatcatcgtcattgccgttctcggaggcatctggtttgcctgggaacagtggaaaggaaatgaagccatccaggtggactaccagacagaacctcttgaaaaaggagacctgatgatcaccatcgaagcaaccggcgtcacggagcctgatgaactggtagatgtaggcgcccaggtcagcggaatcatcatggagttcggcaaggacatgaacggcaaggtagtggattattccagccctgtaaaagccggtcagatgctcgcggaaatcgacaagcttcccgtgcaactggacgttcagagggcggaagcctccaaagcgcaggccattgccggaatcgcccgcgccaaagcggacatccagcaggccaaagccaagcaccagcaggccagactggaccgggaacgcgcggaaaagctggggccgggggatgccctgtccaaatccagctacgaccagtatattgcggatgaagaaaccgcccgcgccaacgtagccgtggcggaagcctccctgcaggaagcggaagcatccctgaaacaggcggaagccgcgctgaaaaaggaaatgcgcaatctggaatacactaccatcaagtcccccgtggacggcgtcgtggtcaaacgcctggtcaacataggccaaacagtagtttccagcatgagcgcctccagcctgttttacatcgccacagacctttccaagctgaaaatttgggccgctgtgaacgaggcggacatcggcagcatccgcaaggggcaggaggtgctgttcaccgtggacgctttcgccggccgcaaattcaagggaacggtggacaagatacggctggacgcaaccatgacgtccaatgtggtcacttacatcgtggacattgatgtacccaatccggacaagcttcttatcccctatctgacggcaaatgtccaattcgtggtagaggacatacgaaacgccttcctcgtttccaatgcggccctccgcttccgcccggaaacagaactggtcagcgctgaacaaaaagcggcctttgaccggatgcagccggagctggccgcccccgtccgggacggacaaaagaaaaaagccgtggtctgggaattgcgggacaatcttctttatccccacctggtcaccaaaggggaaagcaacggcatgctgacagccattgcgggagaaacgctccgggaaggaatggaaatcgtatctacggcccagatactgaaccgctccgacagttcggggaacggttcttccgcctccgccggcggggaaaacccgttcgcgcccaaaatgcccccgcgccgcaagcctagcacaggcaatacaaaaacgccagcctcggccggaaacgacggccctcccccgcctccctgacccggggaaccgccatcattcgacctcttaattactctttttcaccgtatcaagcattccaacaacgtgattcgcttacgtgacataaccaaggtataccacttgggagaaatagaccttcaagtgctcaagggcatcaccctggatatcaacgagggggaattcgtctccctcacaggagcttccggttcaggaaaatccaccctgatgaatatcctgggctgtctggaccgccctacctcaggccattactatattgccggggaagatgttgccaaattcaacgccgcagaacgagccactctccggaacaagcgcatcggattcgtcttccagaactttaacctgctctcccgtaccacagccctggaaaacgtgatgatgcctgccgtatatgcccaccctgccctcagcatgaaagccatgcgcgaacgttccgtggaattgctgaatttggtaggcctttccgaccgcatggaccacaccccggcccagctttccggcggacagcagcagcgcgtagccattgcccgttccctcatcaacaaccccagcatcctgctggcggacgaaccaacgggaaacctggactccactacctccaaggaagtgctgcacatgttcaaggacctgaaccgccaacagggaatcacagtcatcctggtgacgcacgaccccaaaatagccgccttcacggacagggccatcaacatggcggacggtcttatctgcgaagggatttccgatatgcttagcaaggacgacgtatgaaattccttcctctccttaaaacctgcatcagggccctggtgcgtaatcccatgcgcgcagccctcaccatcctgggcatcatcatcggcattgccgcagtaatcgccatggtggaaatcggccagggatctacgctccagattaaaaataccatcgcttccatgggggcggacacgctgaatatccgccctggagccatctccaaaagcggcgtcaataccggcgcgggcggacgggcctccctgaccaacgcggactgcgaagccattgcgaaagactgccccatggtcctgcgggctacccccgtggtgcgcgccagcggccaggtcatttacggcaacaagaactggagcccggaaactgtagagggaggttccgtggaatacctgaaaatcaaaagctggtatgacatggcgcgaggccagcccttctccgaggaagatgtggaacaggccaggcgcgtgtgcgtcatcggccagacggtggccaaggaacttttcggggacgaagacccgctgggcaaggatatccgcatcaagaatgtcatgttcaaagtcatcggcatccttcagaaaaaaggggccaacatgatgggacgcgaccaggacgactccatcatcctcccatggacaagcatccgctaccgcctccagggcctgggcggcggttccaccaccacttccaccggcaacagcaccaccaccttcaaccgggcagataaatacactgccagttccgtggattactacacggaaactacggaccagccctatacggacgctccccatccgcggcgcttcaacaatattgattccatcatggctcagatttcagacccggaacgctcctccgaggccattgaccagattacggaagtgatccgcgccaaacacaacctcaaggacggccagctggacgatttccgggtatgggacatggcggaaatgtcccgcgccatgagcagcaccacggaagtgatgaccaatctgctgatgatcgtggccatgatctctctggtcgtcggcggcgtcggcatcatgaatatcatgctcgtttccgtcacggaacgaaccaaggaaattggcctgcgcatggcggtgggcgcccgtccgcaggatatcatgcgccagttcctgctggaagcggtgctgctctgcgtggtgggcggcgcgctgggcatcatgctcggcaaggcgatctccatcatcgtcagccgcaccatgaactgggccacagcctcctccccggaagccatggctctggctgtaggcgtctccgtattcatcggcctggccttcggatggtacccctcctggaaggcgtccaagatggaccccattgatgcccttcgccacgaataacaccttactttttatttttccatgtcatccacgttcaaacatctcccccttctggccgcctgtttccttggctcctgcatggtaggcccggatttccggacgccgaccaatgacctccccgccacgtgggaggcgaacaggcccccccacagttcggacaaagatttgcgttcctggtggaatatctttggagacccccaactcaaccgcctggtctccacctccctcaacaacaatccggacatgaaggtggctttgctccgcatccgggaggccagggaaaaactccgcgtctcccaggcatccctgcttccctccgcagacgccagcgccgggtggagcctgtccccggacagaggttttcgcagctccacttcccagaacttctccctgggagcgtccacctcctgggagctggacctctttggcggcaaccggcgttccatcgaggcctcccgcgcctccctcatgtccacggaagcttccgcaggagccgtgcgcacagccctgctggcggacgtcgctacggcctactttgactggattaccgcctgcgaacagctccgcatcgccagggaacaactggaaatccaacgcagcaccctcaccattgcggaaaaacgctacaaaacggaattcgccccccgtctggatgtggagcaagccacctccaccgtcgcctccacggaaagccgcatcccgcaactggaagcacaggtggcctcctctaaaaaccagctcgccgtgctgctgggcacctataattcccgtgtagaactgacgctgcccaaagcttccgtttttgagaaaacgcccgtcgttccggtaggcctcccctccgaactcctgcggcgcaggcccgacgttatcgccgctgaggcggacctgcacgcggccgtggccaacgtgggcgtagccgtagcggatctgtacccgcgcttcagcctgacgggctccctttccagccgcggcggagatttcggccagctcttcagggaaaacaacaacgcgtggtccctgggagggaatctgctccagcccctgttccagggcggagccctgagagccacggtacgcgcccagaaagccgcagcggaacaagctgcggaaacttaccgcaaaacgctcattaccgccgtctccgaggtggaggacgccctgatcgcctatggcagctatacatcccagatgcaatacctgcacaaggaaaacaacgccaacagagaagcgttccagctctcccgcaccctgtacatcaacggcgagacggacttcctgaacgtgatcaccgcccagcgttcctggctcagttcggaggaatctctggtcaccatgaaacagaacatccgcaaggccgtggtgcagctcgcccgcgccctgggcggagggtggtaaccggcagctccctccaaaaggccggggtcgccatccccggtaaacggaaccctgatttttcaacaggggacagggcagcaaggaaatgactgaagaatcattctttcgcgcccttcacattcagattaaaaaagaccgtaagaataggaacgaataaaccatccgaaaacttccgaggggattgaacagatagtcaaggtccaggttaaaaacactcttcagccacttctttcatgactgcgctgataaggttccgggttttcacgccgggcagcacgttcaggtccatgcggttcatcgcgtagccgaaggaaaggccgtgggccggatccgcaaaggcatgggaaccgcccgcccctgcatggccgaagccgccggagccgaacagatggcgcagcttgcggcccgtggcggggtctgcgggatcatgcatgaagccgcaggaaaaggcggtgggcgttttcagcgtcaggtccggcccgtcaatgacgacgttccgcatccagccgcgcacggcggacgggaacacccggagttcatccagtcccaggcaggcctggtagaactgcgccatgccgcgggcggaagccacgccgccgaaggccggaactccggatgaccacgcttccggcgtgttcatctgccgcacactgttcagccctatcagagtattgaacgcacggtgtacgggcgtgcccttgttcatgtattccagataaaacggcgtccccatgttggacatgtccatcttgccgggatacagcgtcgccatgcggttccattcggattccggcaacctgatgtaaaagtccagattcaacggtttgcggatgtattcctcccagtaacgccacaggcgttccccggtcagccgcagcatgagttcatcaagcatcaccccgtaagtatgcggatggtagccgtgttccggcggctgccacgccggaacggtttcctccagggcgcgcacgcaatcctcatggtcaaatacgcttgccgtccgggaaaaagccgccaaaccgcattgatgggacatcatctgcgcgatggatgcatagggcagcgggaattcaggccacagttcccccatgctcatctgcggagaggctccctgctggtgcagggccagcagaagggtggcggatgcggctcccttggtggcagagtaaacgggcaccagcgaatgttccgtccatggatgcgtttcatccgctgcggcaaacccggaatgcagggaaacgatctcccttccctccttccagacagaaacggaggcgcccaattctccgtagttacggaaattttcctgaaaagcttcagttatctgccggtactcattcattcccttaaaatgacccggcgttactcccggcgtccggacaggagaatactcccctccggcttcgaaagcaagttccggcgctgccctggatggtcagcgccggaacaggacaagctgtaaaatatcagtccttcgtatgggcagccaggtatttcctggctcccacttcatccggatcctccttcagatcattcagagagaatttaatacggaataacctcatgatgaacacataagaacatggaatcagaaaagctcccaccagtgtagccacccccatgccaatcaccaccaccgtaccgatagcgttgcgcgccagagctccggaaccggaagaaagcatcaggggaatgcatcccagaacgaatgccagcgaggtcatcagaatgggacgcaggcgcagacgcgcggcagccagcgtagcctccatcaagcccttgcctcgctgcatctccagattggcgaattccacgatgaggatggcgttcttggccgccagccccaccagcatcaccagaccgatctgagcgtagagcgtcagctccatgccctgctagaacaacccggcataggcccccagcacggcaatgggaaccgtgaggaaaaccgccaggggaagagaccatttctcataaagcgccaccaggataaggaaggcgaaaacggcggacatggtgaagatggcccccagcccaatactgttgcgcactttattttcctggaagctcatgtcctggtagtcgaagccaaccttcgtgggatccatcgtctgatggaacacttcctccagcgcatccatcacctgctgggtggagtggccgggccggggcatcacgttcaatttggcggcgttgtagatgttatggtgcattacgaattccgtatcctctatctccctgatgttcaccagggcggagagaggcacgcgggctccgtccgcgttcgtgacaaagaagccgtccatcttttccaggctggcgcggtcttcgccctgtgcctggatatacacctgccactgctgaccgaaggcattgaagtaattgatgaaggaggaaccgttgtaggaggccagaattccgttggccgcgtcaatatccaccttgtggaatttgcatttttccttgtccaggttcacgtacttctgcggcatgtccgccatcatcatgtccatgcacaaggctatttccggacgccgggatgccgcttcctggaaccgttgcacctgctcatgcagataagctacgccctgcccttccagatcctccagaaccatcgtaaccccgttggcggttcccacgccggggatggcgggaggttccagcaccatcgccataccgtccaggccggcctgggccagctttccctgaagctttccggccagttccgcggaggtttccggccgttcgctccagtccttgagctcaatgaaagcaatgcaggcgccgggagtctgcacgctgttgaggatgttaagccccaccacggtagtaaggttcttcacggcgggatcctggagggccgcctcaaattttttatcctgttcataggcaacctgcagggaggtattcggcttcaggatcaggcaggccagcagaaagccctggtcctcatccggcagaaagccgccgggaatgcgctccgccacaggagccaccgccccccagaataacaacaggagggggatggaaatcgccagcttgcgggccaggcctccgcacatgcgggtatagccgttggagacacgtccgtaacaccggttgaacagacggtgaaatggggaaaagaggctcttcctgcccgcattccggggtttcagcaacagggcgcacaaggcaggagaaagcgtcagcgcattaaaggcggaaatgagcatggaaatggcgatggtcacggcgaactgcttgaacagcgttcccgtgatgccctccagcagcagggaaggcaggaacaccgccgcaagcaccagggcaatggcgatgacggggccggatacctcctgcatggcggcgaaggaagccatgcgcggattgagccccttgtctatgtgctcctgcacggcttccaccaccacaatggcgtcatccactaccaggccgatggccagcaccatgccaagaagggaaatggtgttcagagaaaaacccaggacgggaaagaggcagaacgtggaaataagggaaaccggaacggcgatgagcggaatgagggtggcgcgccagttttgaaggaaaacatacacgaccagagccaccaggatgacggcttccatgaacgtgtgcttgatttcatcaatggaatagcgcaccgccgtagtcgtatccagggaaacgcgcccggtaattccttccggcatcagcggagccttggcttccagcagtttttccacgcggtccgccgtggcgatggcgttggatcccggagactggaagataacgatagccgcggaaacttctccgttcaggcggccggtgacggaatagtcttcagctcccagttccaccttggcaatgtctttcaggtacaggatttcatccccattctggcgaatgatgatgtcttcgaattcatggggctccgaaaggcgcccctgagtgcgcacggtaatggtctgctcctggccgtccggcacggggtccgccccgatcttgccgccggggttggtggtgttctgggcggagatggcgccccgcacttcattgacggaaacgccgtaatgggtcattttggacgtatccagccagatgcggatggaataacgccccgcgccgtacacctgaacttcccccacgccctccacgcgcttgagttcgtcaatcaacttcacctgggcatagttcgccaaatccacggaattataactgccgtccggggacgtcagggaataaatcatcagcggaagccccggctgctgcttgatggtcacgcccgtgctctgaacttcctgcggaagctgggaggaggcctgcccgtagcgcatattggtcagcacctggtcaatatccgtatcggaacccggttcaaaaatgacggaaaggttatacacgccgttgttggaggaaacggacgtcatgtagtccatgccctgcacgccggaaatctggcgttccaggggagtgcccacggaatccgccaccgcctgcgcattggcccccggaaacatggcctgaagctggatagtgcgcggcgtgatttccgggtactgggaaataggcaggttgaacatgcagaccagccccagcagcgtggtcacaatggcaatcacggcggcgattgcgggatgcttgatgaaaaacgcactcatggcttatttggcagttacggaaggagttgtggaaacaggagcggtatagataaagggaacggggacaaccgtcccgaacccttccgtggctccatgttcccgcatcaggctattcgccttggaatactgggcggccatcatgccgccttccacgatgacgggagcatccgtcggctttccgtatcctatttccttcagagattccggaatgggcttgaccgttcccgtcaccatctgcatcagcatgggggccgagccgcccttgccgtcaggcatgtcaaggactacggtttcccccggctgcacgtcaatgcggcgcggcgtcccgtccggagccaccaccatgatgttgcggtggttcatggaagaaagcagggcgcgggcgggaaccagcaaggcatccttctccgtacccgtcacggcgcgcacgcgcaccgccattccggaacgcaatttcaaatccggattgggaatatggccgacgaaattgacggtgcccgtcgaacggctcacctcgctgtccacggaaaccaccttccccttcttttcaaaaacggagccgtcttccagaatcagttcaaaatccggcatgtctcccatgcgcccggttttcacattcacggttccatccatcaggcggctgagaacctgttttcccatcacggaaaaatccacccggatggggtcgatggaagacatggtcgtgagcggcgagccgctggcggaaatcagttcccccacgctggccgtcgccttggaagccagtccccggaacggcgcgcgtactttggtgcggtccagattaatccgggcgttttccagggaagcttccgcctgcttgatgcccgcttccgcctgttccagagcggcctgcatctccttaaggttctgttgcgcgtccgtcaggttcttgacggaaatagcccccgtcctgatcagtttgtcatagcggtccaaatccttctgcaccctgttcagagaagcttccgcctgaagtttgacggcgcgtgccgtagccaggttggccgcctccctgtccacggcggcctgataagtagccgggtcaatttcaaagagcaattctcccttgtcgcaaatggagccgtcccaataaacctggcgtatcagcgttccggaaacctgcggcctgatgtccgcctgctccaccccgcgcaaatggccgaaccaggaagatttcaactccaccgttctctgctccatattcatcacggaaaccttgagcgggggcatttccctccggtttgcagcatccgcggcgccgttgtcttcccggcaccctgccagcccgcacagggccgctatcagtatatagtgtgctttcatgttgttggttaacaatattattgaagcatgcttcatatttttccaaacccgtttcccgaaaaaaagcatgggcttttattatttgagattgtcgtacatgcgccggagcaaatccctcagcatgctgcggctttcctccggcaacccgtccagcagcgtattttcaatcactcctatctgctggcaaatggcctcatgaacgctccggctcatatccgtcagatacacattcttcagccgtccgtcttcactgtcaaaagccgtggttacccagcccttctgttccagcctctggacaattcccttgaccgtggtatgggagacccccaaatgccgctctatgtccctctgggagacgttttctccgtcacgggacatcaggtaagccagcacccggccctgggaggccgtaacacgttccagagtcaagctgcgcgtaagcatcatatccacgcggtccgtaatcattttcatcaaaaacgaaatcgtaaaagggtcggccataaaacaatgaagcatgcttcaaaaatgtaccgatagatactctttatccggatgcaagtcaagcggaatcagaatgacagagcgcgggaaaaacacgttgccctcaccagcaaaaataaatcaaatccgttcttcatcaataaattgaaaaaactaatcatcaataatccgaataccttcgcatttccttccctcatcatccggcgtttcccggcaaacataccccttccagccacaggaaaccaatgctccgcgcagggataaagaaaaaatacctaaggaacggcccgcatatcaaaaaaggccggacccgcttcgccttctttccagggacaatacgcgcagccgcttttcctccaccttgaatttcacctcccagccagagaacaaaaggccgtaaacccgttccggatcatcctgatattggggacggggatccagggacagcgtatcttccagcgcactcctctcttccggagacatggaaccgccaaaagattcgggaatttccacatccagccgttcatagggaacggccgtaaacccttccgacgcctccggaatgcagtccgccagaggaacatagggcttgatatccagaacaggggtgccatccaccaaatccacgccggaaagatgcaataccgggccgtccagaggatgcaattccaccctttccagcctgacggcagacaacccgatgggattgggacggaacggcgcacgcgtggcgaacacccccatgcgcacattgccccccagccgcggaggccggaccgtagggctccaccccttatccacgttttcactgaacacccagaccagccacagatgggaaaacccttccagaccgcgaacggcgtccggatgacggaacggaggctcaaagaccagccgcgcccgcgcatccggaaccaggccactctggcgcggcgcaccgaatttgtccggataacacgtgctgacgcgggcgacgggctgcaagcggagactgatagttaataattaatagctgccgatctttctccatgacgctttcatcagaagcggtggagctgttctccgagcactacggcatccaccttccccttcagggttttgcccaggaatggggtgttgcgggcgcggctgcggagcgtttcatccgtgacgggcgtttctccttccgggtcaaacaccaccagattggccggagccccctcttccagggagacaggagccagccccatcagccggcggggagagtcgctgcaggcgcgcaccaccgtctgccaggacatctttccaggttccaccagatactggtaaatagcaggcaggaacgtatccagcacaatcatgccctgcggggcgacaacgaaatcctgaagtttggaaaacggcgtgcagggcgtgtgatcggaaacaatgcagtcaatggtgccgtcattcacggcggcaatcagggcatccacatccgactggtcgcgcaggggcggcaacgtcttgtagcaggtatcgtaccgacccacgtcctcatgcgtgaacaggagatggtgaagcgccgcttctgcgctcagcccggcggttttctgcttgcagcggcgcaggatatccacgctgccggccgtagagacggtctgcacatgcagggagttgcccgtatccacggaaaggcggatgatggtttccagccctatttcctccgcacaggagggggagcccatcaaccccagacggtaggaagtagtgcccgggtgcatggccgccctggccgtcagggacggcacgtctccgcgcagggcgaaagtaaggttcagattgctggcgtactgcatggcgcggtacagcagcagcatgttgtccggcgctcggtccccgtccgtgatgaaacggacacccttggcgcgcagggagtcgtaggaagcctgctcttccccgccgtcccccttggtcaggcacccggaggggataacctccaccagggcatccgtccggcatatttccatgaacgtggtaatctgggcggcattgtccatcactggttcggtatccggcatcgccatcagtccggtcaccccgccatgcagggcagcggcggtagccgtagccacacgttccttgtcctcccggccgggctggcacaaatgggcatggatgtcaaacaggccgggcagaacaagctttccggaagcgtccagcgtcttttccgcggcgctttccagaagcgttccggcaggagctttggctgtaatcactcccccggaaaccagaaggtccgccggggcggaaccgtccgtcagccgggcgttgcgaataagtacggaagttttcatgaacaatcagtgctgggtttgcggagtgagatggtaaaggatggacatgcggcaggcgatgccgttttccacctggcggttgatcaggcagcgctcgtagtccatcgccaggtcacagatttccacgccgcggttgaccggccccggatgcatgatgtacaggccttcaccggaaatgcgcttcaggcgttcttccgtgacgccgtaaatcttgttgtactcccgggcgctggggaagaaaggggcgtcctgccgctctttttgaacgcgcagcaggtaaattacgtccggcttccaggcaaacgcctcattgaaatcggaaaaacggggaatgccggaatgttcggtgcgcggcaccagggaacccggccccaggaaggcgacctccatccccagcctcttcatcagcagggaggtggaacgggccacgcgggaatgcaggatgtcccccacaatcagaacacgctttcccctcacatccggaaacacctcccggatggtaaaggaatccagcagcgcctgggagggatgggcgtgggctccgtccccggcgttcaccacactggcgcaggtatggcgcgcaatcacgttcggcaagccgctgttgtaatggcgcacgattacataatccactttcatggcctggagcgtggcgatcgtgtcctgtacggattcccctttcaccacggaagaggtggacaccgtgaaattggtcacgtccgcagacagacgttccgccgctacctcaaaagaggaacgggtgcgggtgctgggttcataaaaaagcgtcagaacggacttgcctttcagggcgggcacctttttgacgcttttggtaaaaagctccttcatcgggccggccgaatccagcagcgtgtgaatttcctcgtcagtcaatgaggagatattaagaagatccttgcggggatgattcatgggaaacggagaatggattggaaaattttcagtgggaaggaatgaccacgctgtcctcgccgtcagcctccttcatgcttacgatgaccttggctccggcatggtccagcacgtgccccgtataatccggctggatgggaacttcccgcccgccgcggtcaatcaggcacgccagttcaatacgggccggacggccgtagtcgaaaagggcgttcagggccgcacgtatggtgcgccccgtataaaggacgtcgtccaccagcacgaccctcatgtcatccgtggaaaacggcaaattggaggaacggagggaaggccgggcttccagcttgaagatgtcatcccggtacagggaaatatcaatagagccgtactgggcttccactcccagctcctttaccttgtccaccagacgccgggcaatcacatccccctggctgagcaggccgacgatggcgaggggttctcctggaaaacgggccacaatgccgtgggccatgcgctcaagagcacgggaaattcccggaccgtccaatacgatttcctgtgaaggaggagtcatctgccggatggggaaaaaagttcacgttacagccccgccagctttaaaatgcggtgggcggccatggcggcattgacgggggttttcttatgcaggccaaccgtggtgcagggcacgccgccggggcactgggcaatcgccagcagggcgtcaataccgttcagggggcctccgggaaccggcacgccgataaccgggagggaacagctcatcaccaccacgccgggaagggcggcggacaggccggccacagccagaataaccgccttttctccgctggcttccagattccccagaaacctgatcagctccggaaggtcgcggtgggcggacagaacggtttcttcataaggaacgttctcctgagcaaaatactcgcgggccggttccataaagggcttatcattcgggctgccgtagatgacgatgactttcatggctgtatgtgctgttgtgaaacttgcggattatgaccccaagccccctgccctggcaagacttaacctgcaaaaaaatgaagagccccggttggaaatgaaaaacgggaagaagaaaacgccggagttacggaaccgttccggggaaccggcccggcatccttgtcattcctccattccggattccaccgtcccttcatcctctccgggaatcttcaattttccagagaggatatccttcctgatccggtgaagagccttcagcctttccgcttcacccaatccttccgtttcccgcatcaggaatgaagaaaactgtacggaacaattctccagccggtatttttccagaatacttccccccatcttcatgtattggcctccgcactccccgtaagcattcagtatttcatccgcagtcatcttctccttttccacccgttccagcaatttcctgaactccctaatcatcttcagatgcatggcgcggtaatcggaagggcatttatccagcattccaatccattcgggagattgaatatacttgagcgtggccaccagaaccgcacgattgtccttttcctccaactccacaatgcacgtccaaataatgcccagctgcaagtgtctggctatagcctccctgtatgccgccactttttttccttcctccatttccaaatccacattagccatggagggcgccgcaatatcctgggacatgccggaaagcgtcatcaaaaacgcaggaaggattccccaccggaacagatttaacatgaaaacacgttacagaaatcttttacgcatggtcaacaatattcttccctcccgggaaaaacgagccggcttccatttcccggcctgatgatccggttccggtataatacagaggggggggacgcaggcgcgtacatctatccggaaaagcagaaaacctgcaccgcactgatgactgccgaccgcttgaaaaaacctagcgggtcgcctgctgcgccatggcctccgcacaacggcgtccgtccagggcggcggaaacaatgccgccggcgtaacccgccccttcgccgcatgggtacaggccctccagaccgggatgctccagcgtggcgggatcccttggaatgcgcacgggggagctggtgcgcgtctcacagccaatgagctgggcgtccgttccggcaaatccccgccatttacggtcaaactgccgcagcccctcccgcatgcgccagacgatcccttccgggagcaattcatgaaggggatgggatacgatgccgggatgatagctggtaggcagcagggaagaagaaacgcgccctttcagaaaatcctccaccttctgggccggggctttctgcatgcctcctccggcacggcaggaagccgtctccagcactttctggtacgccacgcccgccagcaccccgtgttccctgcaaaacggttccgtatcttccggatgcacgctgactacaaaaccggcattggcaaatggagaatccctccgggccagagacatgccgttgaccactacctcatcgttctccgtggcggcgggcacgatgaagccgccgggacacatgcagaaggaatggacgccgcggtcctggatggtggtcgtcacggaataacgggctgccggaagctgctccgggcgcctctgctccggattcaggtggtactggcgcgcatcaacaaacgcctggggatgctcaatgcgcacacccacggcaaaggatttctgttccagagccagcccctccgccagcatcatgcggtacacgtcccgggcactgtgcccggtagccagcaaaacggaatccgccgcaaattcccggccatccgcgcaggccacgccgcgtatgcggcggccgtccgcagaacggagcagatgctccacacgggcattgaaatgaatttccccgcccgcgcgaaggatggattccctgatggctttgacgacattgggcaacagattggagccgatatgcggatgggcgtccgttaaaatttccctgggcgctccgtgggctacaaaaatctcgtaaacctcccggacggggcctctcttggtcgcgcgcgtaaacagcttcccgtcggaaaacgtgcctgcccctccctctccaaaacagtaattggaatcctccatcaccgtgccgcggcgcaggatgggagccaggtcaaaccggcgggaggaaacatccttcccccgttccagaaccacaggcttcatacccagttccaaacagcggagcgcggcgaacatcccggccggtccgaatccaacgatcagcgccacgggggagccgggacggacggacggataatcccgggagggaagacgttccggcggcagcgggctatccaccccgaccagcagccgaagctggaagagaatttttttctgccgggagtcaatggactccttcaccagccgcacatctttgatacgggagggggaaatacccagcttccgcgccacggcagcgcggcgcacgcgctcgctgccggccttttccatcggcagaatcacatccaccgttattccttcccctccgctcacagtccctccttccccggccggggctgctgctgggtgatgcagtggatggcgccgccttccagcaccagcttgcgggcatccacccctattacctgttttccgctgaaacattcacgcaaaatgcccagggcgcgatcgtcattccggggctggttgaatacgggaacaatgacggcctcattaacaatgaggaaattggcgtaactggcagggagctgatccaggcgccagtcctccgcatggaggggatccggcatcggcaggggaatcacctccaccccggaaccgtccacgcatctcaaatcctgaaggcgttcattattctccgccagagcgcggtaatggggagaggaagaatccgtttccacgatggagactacggcatcccggcacacaaaacgcaccatgtcgtcaatatggccgtccgtatcatccccttcaatgccggaaccgagccagaaaacggctctgacgcccagcatgcgcttcaattcctcctcaatcatggcccggctccaatccggattgcggttgggattcagcagcacggactccgtcgtcaccagcaagccgtccccattgccctcaatcgcccccccttccagaatcagggaagaactgcgcacgggaagccccagcgccgccccaatcagggcgggaacgccgttgtccaggtcccacggggcaaatttgccgccccacgcattaaattgccaatccgccagcatcagagaaccgtccttcacatcctggacgaaaacggggccgtggtcccggcaccatacgtcgttggtcgggtggttgaacaggcggaattgctcctcactcattccggcggccagcatcgcctgtctgacgccgggatgaaggggagctgcggcattcacgcatacaagggcatgcggagcaatggcagcggccacgctcccataagtctgctgcaactcgtccagccccccttgccataaatccctgcggtggggccaggacagccagacagcatcctgaggctcccattcagcgggccagcgtacatcgggttccttgttcatggcggtatcgggcggttcaactgggctggtcctgaaattcataaggttcttcaaaagccttgcggaagctcatgaagcccttgaaatcatccagggaatcctccggctgtttggaaaaaacgtcttcctcaatcagtaaaaaaaccatctcccccacattcttcccgttcctaagcccccattccttcatcacggtggaagccatgggcccgaactgggcgagggcgtaatcccggaacccttccagcagttcctgcccgctgacatgcctctgagagccgttttccctttcttcaacgcgctgcatggtaaaatccagcgcatctttcagaaaagaatacgcccgttccgcaaaacggggatccttccgtacgatacggctcacggcatcttcaaacgtaggggtggtcatagcggctcgccactaccctatacggccccttgtgaaaatcaagatttttgggagcgctccagcttcagccctcccttggggacagcatggggaaaatgaaggcagccgccccctcgctggaacggaacgccggacgcggcagacggcaaaattcccgtccatgatatagagcctcaaaaaacgcacgcgcccgcattttgaatatcatgcttctgcatgagcgaccctccggcaggcagcggtttttacgttctgatgccgtcaaaaagccctgtaagcaggaaggaaaccttgccagcctatggtctgtttgttatgaacggaatactttatgttccgttcctccatcatgcttctggcaaccatgctgtgcgtttcctgcgtatcgcaccggcctatccaggacagcagctccccgcccattgacgcggccaatcccctggacggcacccccgtggcgctggcgtggagctccggaacgcaattaatgatgggcgtagacacgggagcagtccagacatccctgcttttctccccggcagtggaatccatcggcgcacgcctgcgcggcaggggcgccatgcgcacggccaacgtgcctgtctccctgaaggatgacggggaacccatttcccggaaacaggacgtagtaatggcagaccaggccccgtatgacggtttgctgggctgggaatgcatccggaaatatgtgtggaacatcaactatcccaaacgctcccaccgttttttcaataaacttccctccagaataaaaagctggaacaagctttccctgattcccgggtccgactatccgcaaatcgcggacaagcacggaaggcgcatcattctggacacgggagccccccacgccgtttacatctccaaaaaacgctggaatgccattaagcaggcctacccggatgcgttcgtcagcgtctattccggctacagccccgccgcaggcggcttttacgcccacgaatgcatgcatgtaagctccttccagctcggtccactggaattaaaaaatatcctgctctgtgaaagcttcgccaacccggaagtgatgggcatccccgatgacatcgacatcatcctgggctacggcgctctggccgcacgccagttctggctggacggcccggggaacgccctttatttcagctccaccagccaccggatgcccgcccccgcctccttcaacctgatgggaggcacctttatccaggacagcaacgggaacggccccatgaaagcttacgtggcagagtggtcgcccgcatgggacgccggcctcagaacgggagatgttcttatttccatcaatggaagaaagaatccctatccggacctcgtagaatatgttaccacccagcggggggctcaggccagcgtggtggtccagcgcaggaacaggctggtgcgcatccaatgggaagttccggccgcgccccctgccggggattattaccccacgccccaggccattacggaacaggaattcgaaaaccacgtcaggcagcaggaaaaaaaagaacagactcagccctccgcagacggccagcagcctccggctacggccggagaaactccggatgaagcctctcccgcagctgacgggaaaacggacaaggcctccgctgcctgagccgggccagcaaccagccatctctctacaccggcatgaacaacgaacaacatcaaaatacccacacttccgacgcccccgccattccctcccccttccagaagagaacctgctggcatgccctgacaggcgtatccattctggtgatgctgggcattgcggccttcgtcatttttgaagtagtggaacttctggggtttctggaaccggtgctcctgcccatcctgattgccgccgtcgtggcgtatttgctggaacccatcgtttcctggctggtgcgtctcaaattctcccgtccatgggcagtagtcacggtcatgtttgcggctctggccgttctggtaggctttggagccacgattctccctcccctgatcaggcagacggatgaactgatcgacaaccggatggagctatgggacaaaacctccgaactgattgactccaccattgaaatccccttcatttcccgcaccattgacagtgtttacagcaccagcctgcgggaactgaatgccagccattatacggaagcggaagtccatgacctgagaaacgcccggaccgcccgggaaaagctgggagcctacatgaccatcaattcctccttttaccaggacaagctgatgagctggctcacttccgggggacgggccctttacagcaccataggaatcatggtcagcatcctgatcacgcccattttcgctttttattttctgctggaggcggataaaatcaaagagaaatggcccagcatcctgcccctgaaagtctccaaattcagaaaagacgtggtggacaccatggaggaaatcaacggctacctgatttccttcttccgcggccaaatgctggtaagcatcattgaaggcattctgattgccatctgcctgaagctgatcggcctgccgtacgccattaccattggcgccgcggtctgcgtgctgggcatcattccctacctgggtatcatcaccgcctttatccctgcggtgttgctggcctggttcacatggggggatttccagcacgtgctgattgtttcgggcatcttcctggccgtcaaccaatttgacggatggatcatccagccgaaaatcgtgggggattccgtggaactccacccgctcacggtcatgttttccgtgctgatctggacactcatcctgggcggcttaatcggcgccctgctggctgtccccctgacagccgccatcaaggtcctttacaagcggtacatctggcagaatgccagcatgcgccccatgacggaacccgtgcttccgccggaacatcccggcgaacagcctccggacacccccgaagattcggcccacgcttaaacagcggcatccttccgaccgccctttccggaaaattataatcacacacacctgacaacatgaataaatccgcattacacctgatgcttgccctggcggcggcagcggcctgcccggccgcagtcacgccaacggtcaagccccccaaggccatcgtcatgatttacgctgacgacctcggctatggagacgtaggctgctatggagccaagggaattcccaccccctccatcgacaagcttgccgagcagggctgccgcttcacggacgcctattccaccacatccgtctgcaccccttcccgctatgccctgttcacaggagaatatccgtggcgcaaggaaggcacgggcatcctgccgggagacgccgccctcattatcgataccaagaagcccaccctgcccaagatgctccaatcccacggctacaaaacctacatgataggcaaatggcacctgggcctgggggaaaaggggaagaaaattgactggaacaaacatatctcccccagcccgaacgaaatcggatttgacgagagctttatcttcgccgctacgggcgaccgcgttccctgtgtgattctggaaaacggcaatgtccgcaacctggacccgaacgaccccattgaagtatcctacaggcacaacttccccgggcttcccaatggcaaggacaataaggaccagctcaaactcatgtggagccacggacacaaccaggccattatcaacggaatcggacgcatcggattcatgaagggcggcaaaagcgccttgtggaaggatgaggaaaacgccgatgtaattacggataaggccattgaatacattcaaaagagcgccaaagccaaggaaccgtttttcctgatgttcgccacgcatgacatccacgtgccgcgctgcccggaaaaacgctttgtgggcaagagccagcacggcgtgcgcggtgacgtgaccgtggaactggatgactgtgtgcgccgcattacagaggctctgcaacaggccggtctggaaaaagacgccctggtgatcttctccagcgacaacggccccgtgctggatgacggctacagggatttcgccgtccgggacaacgccacccattcccccgctggccccttccgggcaggcaaatacagcattctggaaggaggttcccgcattccgttcatcgtcaaatggcccggcgtgatcaaccccggaaccacgagcaaagccctgctcaaccagatggatctgggagcctccctggaacaactgctggcccccggcaaggccaattccttccgtgactctgaaaacgtgctgcccgcccttctgggcaaatccgccaaggggcgtgactaccatgtcatcaacagcaccggcaaggcgttggcgattcgccacggcaaatggaaattcattcccgccggcgtggccattcgcgacggcatcaacggagcctccgcaaaaatgagcaaatccccggaaggaggaagcctctttgacctggaaaaagacccgaaggaacttgacaacgtagcctcccagcatccggacatttgcgaacagatgaaagccaagcttgaggaaatccgccagaggcccgaaaccaaggctgaccaggaggacctgcttcccttggacgactaacatccattcgggccagatcatgagagaatccgccacatgctcccaatgcggccacgggtacacctacccggccggactggacgccaaaaccggcatgcgctgcccggcgtgcggcgttttgattcacgttacaacggggcttcccttcggggaagcctcctcttcgccatccggccgcaaaccggaaaacgccatgaaaacgcaggccgccctgcctcccgtcaggaaaaagcggccggctttctccggacgcgatactgacgaacgcggcatccggcaggaaaacctgccgcagctgccagccgcagcatccggccgccggattcccgctacatcatggctggcatgggggctgtccctgatagcgttgattctggcctttattttcccctcctacggaaacggttccacagatccgctgtacatgcttcagtgcctgccctccatggtattcggctgcactgcggccatccttttcatccagggcctggcggctttgcgccgctaaaaaacaaagtctgcggccccatccggggcccatgcggcagccccgtcccaaaaacggccagaatgcctggtttccatgcccctttccgcggaaccgggcttttaggcttgcctgtcaaatgaacagattttaagttacgtcccggtaaacgttatggaacgggaggcagaggcgaaggataacctgtggagggccagactggatgccgtcctgatgcacaggatatggggttcccttatcttcctgggcatcgtttatattattttcttcctgagcttcgctatcggggatcctctggtcaggctcatccagacgggaacccagctgttcagcgtctgggccagccgcatgctggaaccgtggccccgcctgcaatccctgctgggggaaggcgtggtaggaggcgtgggcggcgtactggcctttctgcccaacgtggttctcctcttcggggccattaccgtcctggaaaacagcggatacatgatgagggtttcccgcctgatgagccgcatcatgaaaatcatggggttgaacggcagcagctttgcccccctcctgctgggattcggctgttcggttcccgccatcctgtccaccaggagaattgaaacgcgcagcgaccgcctggtcaccatcgccgtgttgcccatgatgagctgtgcgggccgcctgccgatctacatgatgttcgtctccgccctgtttccttcccgcctgcaggcccccgtgctgttcgggatttatgccagcggcgtcctgctggcgctgtgctgcgcccggcttctgaaaaacacgcttttcaaggcgccccagagggattccctccaccacatgaagcgcctgcgtctcccctccctgcggaaggtgggcatcctgatgtggtcgcgggccttcatgtacgtccggaaagcaggcactttcattcttggggcctccatcatcctgtggtttctgaacacctaccccaggccggaagaagacacggcgccgacaaacgcagcggccatggaacattcctacgccggacaaataggccattggatggaacccgtcacgcaagtggccggatttgactggaaaatcaattccgccctggtaggagcctttgccgccaaggaaattttcgtcacccagatgggtatcctttatgcggtggaagacggaaattcgggcccggcggcccagcagacattgaacgcccgtcttaaagccagctacaccccactccagggcatcagcatcatgatattctgcctgatcgccctgccctgcatcggcaccgtcaccgtcgccaagagggaagcgggcacctggtggttcgctctggctcaattcggcggattgaccctcctgggttttgcaacggctacgctgatctaccaggcagggctccttctgtaaaggccagccataaagaaaccggaagcaggaaatatcccccggaagaagaaaaaatgaacctcgtgaaaaaagaggcgtttacgatgaacttccgcaagttctcctgctctacggtcaaatgatcacaacatcgccatcatccggccacgaaagccgcagcataacaccatgcatggccgtgcaagcctcccctccgcaacaatccggaatcagtatgcgccgctgaagcctttcctgttttttcaagccgtccgggtatccttttccgtttgcagaggggggacaacctgcggcaaaaaagatcatgcagccatttccggaaaatcaatgcccttttgacagggagtaatcaaaaaaggggcaccaattatccattcggtaatctttgccctggatatgggccttaacctcatctccctgggaatccctcagacagccccgcgcccccgtccgcggaccggaaggacggtgttcattaatcgtcatcccatagcgtaaacgccctttcctcgggtccttctccgtcaacagctgtaccgtattctttcccaccagccggacagacttgatggcaacatcctctccctcagcccccacaagggaaaaaccataattgccaggatcgtcaaccgtcttcgtgtccagaaccaaagggggacagggagcataaaatgccacttccaccgtccaaccctttccgaactttctgattttatggttcaggggatgcacgggtttccagtccgccccatccaacaggactttcttcatgacatagcccacatactccccataaaggcgggacatgggcgccgtcaaatggactccgtcgctatactcgaaatggtacatcggggtcgtcatcacataccggctgtccttctccaaagccatatccagctgttccagggcaatagccggataatccgtaggattaaactgataatatttcaaatgggaaccaacctgatagccgaaacagaccacatcgtttttctgcccggtcacggccctggcgtcatgatttatgtccctgatcagcttttccattttttcccgataccattccctcgtctttctgtcctggtgatccgtctctccctgggtccagataaacgcaggcatggaaagggtcttcccttcccggtcagccagtattttggcggccttcaaatcatccaaaatgcggttgtaggctccagttcccctgcccagggaaccaatgctcgccccacccactcccgtcgcagaacaaatcaaccggatacgagaagccgtaacgggagaataacgctgcatcaggcggaacaaacgacaggcagcccctgatacgggagtttcaccgcgcggcccgttcactccttcctccagaggaaccagcatcttgcggtcactgccgttctcatacgctctcacccctcccctgaacatatacaagcccccttcctcctgcttttccgttacaacgggcttagccgtccagcccacagaaagggattgaccgtaagaagttaaataattccaatccgcccactctgttttccgggaggcacagattgatgccgaagccgccgcagccatgtggaaagcaagcaaaattaaggtaacaggaatattcattgataattcaacggattctctccgtgaacatacgttagccgtcccctctttttatcaattcctgaacacaaagctatccatccattgctgcagtaccattccgccaggaaatacggaattgccgttccagccgggtccacgccatgtttcggcaccatgctgtaccggcaggaaaacgcattcaacataccgacgggatttttcatcctccaaaagaaaggcggcagaaacattccccgtactgtataaacaacatgaatcatttcccgtctatcaacgccatatccgcctccatctgccttctgggatgcggactcgccctgcctgttttctcccaacagccggaaaaaggaaaacccgatgccgcccacatttccaaaacaaaagctgactggtggagccagaggcacgccctgttaaagcagaccctggcggaaacaccatgccaattgctattcatcggcgattccatcacccatcgctgggaaaccgacggcaaaaaaatatggtcccaatatttttcccctatgctcctgtcaatttcgggataggaggcgacaggacggaacatgtattgtggcgcattgacgattctgcccttaaaacgccgcattccccccaagtatgcgttatcatggtgggcaccaataacacggggcaatacaaaggcaggcagaccccgcaggaaacggcggagggtacccgggaaatagcttcccgggtccatcggctccaccccgccactgaaattattcttctgcacatctttcccgggggaaaacggcggaagaccccctgcgcatccaaaatgaaatgatcaacagggagctggacaaaacaaatatgccgagagtccatgtcgtcaacattaattccgcattcctggacaaggacggcactttcctgccgggaattaccggggacctcgtccaccttacagaaaaaggctaccgtctctgggcggacgcactactgccggaaatcaaaaaatacatgaagtaagtccgctacccccttccgcccggctcaacggccaattcggcctcatctgcgcagaagcggccagccaatcatggttgtcactcccgcacataaaaaaccggagggattattttccctccggttttcggatacggccgttaaaaccgtttaaattgtcttaatcacggaagagtcgtcatcatccctgtcctcggcagaagcggccttcttggtgggaacaggcgtcttcctgaccttttccagagccttgtccaccgccgcaatcaccttgtcttccccggtcttctgactggacaactcattataaatcttttccttggcctcataatcggccttggctgccgcatcgccgggattggccttgaacttgtcctccgccttgaacaaggcttcctccgcagcctggaactttggttccaccgcgtttctctggtcttccgccgtctgcttgatgcggcccagcaggcgaatcacatacgggcggttgctgagcctcttgaatgcggaaaccagaaactggcggcgttcgctggttttggcatccgcaataagggggtcaaacaacttgagcgtggcgttgtcatcccggtcacggtccacggagagtacgcggagaatggaatcatgggcctgggaacgcacgcgttcatgcagggattcgtctttccaggccttgaacaggtacggaacggcgtcatccgtattccagtccccccaggcggtaatgatggcaagcgcctttttgggatcctccttatagctcttttccatcatgtccagcaccttgggatcaccggtgcgggccagcagcttgtagagcattttgacgttttcctccggcatgtttttctgatactggagcagtttggaggaaagcgccttgcgcttggctggaggagcttcgtcaatcaggtagcgcgccgtacggaaagcggaggaaatcaaatccggggaagcatccttcttctggaggatcttcatcacgtcgtcaaggtcgtccagcttcatggcaaaacgcatgtacttgagcaccacggcctgcttgtcctggatcttcttattcttgctttcgctgatggaagcgtacaggtctttcagcatgtcgcgcatggcggggctggaagacttggccaaaagggtcaccatcatggaatatttctccttactgtacctgccgacattttttttcatgtcttccaccacctggcgggcaatgttgtcatccatctgggccatgatggaaaccaggtgggcggcgccgggccagttttccctgttgcccttgactcccctcacattggcgagcagcagagcggcatcctccgcatcgggaacgactttcacatccggaacacggctgagattcttggagtcaaacagacggctgcggcccagtttcccgccttccacgaccagcgcattcaggcgggcgttctcaccttccaccttttctttcttgctgctggtgctccatgcataaatccctacgccggcagcgatgacaaccagggcgcataccccataaaggacaccccgcagcagggatttggatttatccacggaagcggccatatcccgggcggattccgttccggcgggaggctgaataccgccgtcgcccgccggaggagcgccagaggcaggggaagctcccgcggcagccacaggctggggaaccgcagcgggagccatggaagaagctggtgctgcccccacgggggattttaatactttcagcttgggaacggcgctttccggagcggcggccggggatttctccgccgcagcgggagccgcgtccgtcttgaaaactttcaatttgggagcccccaccgcaggagcaggctccggaacagacggttccggggtctgcacagccgcaggcgctacccctgcggcctgggccagtgcagcggcctgagcctccgccagggctttctgggcctccgctaccttggcaagggcatcctgaatctgggcatccacggagggctcgggctgcggagcggaagcggcttcctttttctccagctccgccgcaaggcgtgctctttcctcttcggcagctacacgggcggcctccttttctgcggcaatgcgcgcggcttcggcagcctcctgctccgccttgattcttgcggcttcctgctcggcagctattctcgccgcctccttttcggcagcaatacgggcagcttcctgctcggcagccgccttttccgcagcaatcctgtccgcctccgcctgttccgctgcgcggcgggcggcttcctcctgctcctgagccagcttggcctgcaactcaggagtgagaaaacgcggcttgacaacctccacgccttccgcggcgggagaaacaaactttaccttgggtgcggccgcaggggctgccgttaccaaacggcgtcgcaatttgggaggttccggcgaagaaggggttcctgtctgatcggtcatcgtgataaaatggctgggaaattggagtgattttatacgattccgcggtcccctgcaacctcaaaataccgtctggaaaacgggcggggaacagccgccgtgcgtggttcaacaggcagattgcgaaaaaaggcttcacccgagatataacatggaaaagcgtttaaatatcccgcgtattctcccgcaaaatcataaaaaacacaatatgttaacaacaacaatcatgaataaagtaaagcgcccgtaatagaacttcaagaatacgtaccagtcatttaagaatcctcttaaaaaatgttataacacatatacttttttcttgccagaccaaggatgattagttaaataaataaccactcgtcaacatcatgaactccaacgacagtaccaaaaataagaggcgctacacgcctgaagaaaaacaatccgttcttgatttcattgctgaacggaaaacccaaaacaaaaggggtgcccagaaagaagccgccgaacgcttcggcatcagcacggtgaccatctcaagctggatgaaggcatccaaggccaagcgcggccgcaagcccggcaccaaaaatacaactgctcccaaaacacagcctctcgcagccgcccaacccgccgacctgcgccgcctggcggccgttctggaagaaatcgccgaccttgaagcccagacagccaaactcgacaccctgcgcactgaagcggaggaactcaagaacaggctgactgccaagcaggcctgattgcttttattccttccttttccggaaaaccggcttcccctgacaagggaagccggttattttctttacggagatcgcgcttgcccccccggaacaattcctttaatatccgccgtcgtgactcaacccgcccacattgctcccgcgagtcagtctgtggaaggcatgtatgccgactactttctggattacgcctcgtatgtcattctggaacgggccgtacccaagatcaatgacgggtttaaacctgtgcagcgccgtattctgcacgccatggaccgcctggacgacgggcgttataataaagtggctaatatcgtgggagacacgatgaaattccatccgcacggcgaccgttccattgcagacgcgctggtggggctgggacaaaaagggctgcttatcgacacgcaggggaactggggcaatattctgacaggcgaccccgcagcggcttcccgctatattgaagcccgcttcacctcctttgcgcgtgacgtagtattcagccccaaagtcacggaatggcagctctcctatgacggcaggaacaaggaaccggtcagccttcccgtcaaattcccccttcttctcgctcagggagcggaaggcatcgccgtggggctttccagtaaaattcttccccacaacttcaatgagttgattgaagcctccatcgcctacttacgcggccagcccttccagcttctgccggactttccgaccggaggcgtgatggatgccaccaactaccgtgacggagaacgaggaacgggccgcgtccgcatcagggcgcgcatcctcacggaatcgaagaaacttctccgcatcacggaaatcccgttcggcgtcaccacggaaatcttaattgattccattgtctccgctgcggaaaagggaaaaattaaaatcgcccgcattgaggacaatacggcccagcatgtggacatcctggtccatctcccggccggagcggatccggagcagacgaggaaagccctgttcgccttctccgcttgtgaagtcagcatctccccgaatgcctgcgtcattgtggaggaaaaacccaggttcatgtgtgtcagcgacatcctgcgctacaatacggactccaccaaggaaatcctgcgccaggagcaggaaatccgactcaaggaactgaacgaggcgtggcaccaggcaagcctggaaaaaatattcattgaaaaccgcatctacctctccatagaagattccgaaacgtgggaagaagtgctcggcaccattgaccgggaattgcagccgtttgcatcccggctgcgcgcccccattaccagggacgacctggtaaggctgacggaaatcaaaatcaagcggatttccaaatttgacgctttcaaggcggaccagcacatccgccagcttgaagaggacatcgaacaaacgcagaagaacctcaaccagcttaccaaattcactatccgctggtttgaagccctgcgtaaaaaatacggcgccgcctatccgcggaaaacggaaatttcctccttcggctccgtaaaccgcgcgcaggtggctgttgccaatgaaacattgtatattgatgacgaaggctttgccggttacggcgtcaagaagggaaaccctgtctgcaaatgctccacgctggatgacgtgttgatcattgacaatgcaggcgtgctcaaaatcgtgcggattcaggacaaatttttcgctggtaaaaaccccctttatatttccgtcatcaaaaaaggggacgaccccgtgttcaacctgatttaccgggacggaaaagacggccccgtgtacgccaagcgtttccgcataggagggttcaccagggacaaggaatatccgcttacccgaggcgcaaagggaacgcgcatcttccacttctccgtgcatgaaacggaggaaaacagttcccagataagcgtaaacgtttatctgaaagccgttctgaaactccgtaacctgatcaggcccttccacttcgcggacctgagaatcaaaaaccgcggtgcccaaggaaatatcattaccaggcatcctgtggaacgcgtctcccgcatcatgcctccggccaagtccggaaatgaggaaacggaagggccaacaaccgctccttccgcaacagcggaacggacggaaggctcacccgccccctccgcggaaacgctgcatcctgaaacagccccacatttggaggaaccgcctgccgatccgccgctggaacagggctccctgtttgactcctgaaacgttttcaatctcttaaaatggaaatatccatgcctgactatccattttcggcttgccacaacgggccatcttctgtagatatggaccacctcattaccatgccgctttagctcagtggtagagcacccgccttgtaagcggacggtcgtcagttcaaatctgacaagcggctccatcataacccgctcaaggtcaatccttgagcgggttgcttttatgaggcgtgcgccattactcgttcccatgaatttccggcgtgccgcttttgaacattcatcatccattcatatctccggcggaatgcggcagccgcaggaagcaaagcgggacgcaacatctggcaagaggccattccacccacaggcatccccgtcaacttccggcagcgaagggccattcccggagcgggaagaaggttccgttggcgataacgccgcctcagcaagccgtttccccccttgaatacgcctccattgccatttcgaccaagggaaccatgattcaagccaatggatactacagaaaaaaagatggccgcggctatcctccggtttgaagacagccgcgttaccgggccggattccctgcgcgtttctcgccttcctgccgccgacaagggcggcaagtgggagatttgcggcatttgcgacggtattgaaccgaccgtgtttaacagattgaaggccctgctggatgccggaagacgtgaagaggcctgggaaggttgtctccagtatgtcctggataataccgccgccgtgcgttcctggctgggttccgacgcttatcctggcgttgaattcatcctgcgcgaccattttttcaattccgggagcaggaataccgggaagattttgcagcgcgcgctgaacattcacggcgccgggcttgtggtggacggcatcccgggaaaacaaacccggcagatgttgcaaaccgttctcgcccaaacgggagagtccgaatttctctccactctgaacgaacggcgcaaatcattttaccattcttgcaaacagttccccgtgttcggcaaaggatggctgaaccgcagcaatgaggcataccggttcgcacaatccctgatttagggaagttcctgcaaaaaactcccggaaaaggagtacaggaaaatttaaccatcgttgcagcaacctgtttccatgcgccggatgccatgaaagagcctccgtgcaaacatccgcacggaagctctttcattaacaggatcaggaaaacgcttcgtcccccacaaatgctcccagcagacggcaaaaccgggaagcaggtaattttaccaatctcccgtccccccgcttgccatgctgggtcagaatccagggcagggaaagaatctcccgtttataagccagcaattcccgtacatctcccgccagaaaatggagatgccaggcatcacaccgtcccggctcaaaacggaagcggacatcgacaacctttccgaaaggtgcggcggaatccaccctgcgcgccatcaggacaagctccggagtacggatatagacatcctggaggcggccgtcttcctccatttcttccaccctccggcctgcagccagataataggaaaaggcggcagataaagcgttcatgcccagttttttcttatgccgccccaaccgctggctcaccggacaatccccatcggaacggctcctgaagagccgtttttcctgaaaccgccggggcaaaagatcggacggcgcccagtcatttaccctgccggattttccggataaccggaggcatctccgttttcggctgtttctgggagtaggacaaatgccccggttccagcaccaggcaggaatcgtccctgcatatctccgcccgctctgcagtcacgtctacggtatgcccgcagccggagaggagggaggacgccgcataagccgctccggccagaaccacccacaagagacgttcccaccaggtcaatccgggtcgtgttccgcttttttcataagcgtttttcatgccctgttttcctgcctccagagccgctttcttttgttcttctgtcaaattgaagtccatttgagagagggggtgagtggtttcaggaattctcgcgcatgttgtgccgcaacggttccgcggggaaaactggcgctgcggcaggactgtttattgctattcattttgttctttttttgttcattgcccggaaacggcctttgccggcatggaaccggcggtgacatcagaccgctcccggacacagacatccttgccctgcccttggggcgggagcaacacgcctgatacgtccgggaacaaggaatattccgccagagacaaacgccggaatttccgccgcggataacaaataccctgttgaaaacggaaccggttcatgctagtctcttccctgctatggcaaaaccggctctggggaaaggctttgacgcccttatcaatcaaaatttgtctcgtgaatccttggcggctccccaggcgggagacgttgtgcatcagctatcccatgccgccattattcccagctccctgcagccgcgcgccattttcacgccggaacaactggcggaacttgtagattccatcaaggaacacggcatcatccagcctttaatcgtccgtgaaacgcaaaacggcaaatatgaactgattgccggggaaaggcgctggagagcctccggcatcctggggctgtccaccgtgcccgccatcatccgggaagcttccgacaaggacgtgctggaattggccctgattgaaaacctccagcgggaaaacctcagcccgctggaagaagccgccggctatatgcgcctgaaaacggagttccgcatgaaacagggagacatcgccaagcgcgtaggcaaatcccgcgccgccgtagccaacagcatgcggctgctcgacctgccgcagccggttcaggacatgctgggcaatacctttatcagcgtagggcatgccaaggtacttctctccctcaaaaacaaggaccagcaaatccagctcgggcgcgacatcgtcaacaagggctacaccgtccgccagacggaaaaggccattcagaagatgctcaacccgccggatccggctcccgctaaaaagccgtcctcccctcagtacaagaaaatttccggcatcctcgccaaacaattcggaactccggtgaacatctccggccagggaagccggggctccatcgaaatcaccttctccagcaaagcggaattcatccgcatccttgagcttctgggccaggatgaatggcccgattccaagtaaacttcctccccccttttccatgacgccccgcatcggacttctcctgttcacggccctgctgatgcagtgcgaaaaccccgtggaaacgcccctgcccggtgtggaaaccgttcccgcgcaaatccggcagacggactgtttcaatggaggaaacgctctgttccacgccgcgcggataacggaaatggggaaccgcgcttcaggcactcccggttaccgcaggcagatggactacctgaaggaggaactgaccaaatacggctggacctgccgggaacaggattttgaaaaggaaacgccccagggccccgtccgtttcgtcaacctgagggctcgttttggcaaggctccaaatttcctggatccggttcgaggcctgctgacctgccatattgacaccaagcggggcattgacggattcaccggagccaatgacggagcatcgggagctgcggccattctggagacagcccgcattctgtccggagaccccgcacgcgccagaaatttggagcttgtgttttttgacggggaagaaagttttgcggaacatatggacagcgacgacggcctgtacggctccaggcattacgcatcctccatgcaacaaccgctccccaaatggataatcaatctggacatggtggggcggcagggtaaaaagatacgcatcccggccatgacgccccaatccatgtaccgggtttattcccgcgctatccgtgaactgggttattccccggaggaatggggagtatccggctatgccatcctggatgaccacgttcctttcatggagcgcggcgtggacacgctgaacctgattgacgacttccaggacggcaactggtggcacacctccaaggataacatcggcattctgggcgaaaaatccttccagcaaaccggggaaatgacccttcacatcctccggcaactgctgcccggcccgccctccgcctgaccaggcagctctgaccctccaattatccctgtcccgccatgtccttcaactctccctggctgctgtgggctctctttgcagcctccgttcccatcatcatccacctggtcaaccggtggcggcaccgttccgtcccctgggcggccatggaattccttctccgtgcggccagggaaacacgtggaacgaaaaaactgctgcactatctgattctggcactgcgcgtgatggccgtggcggcactggtaacggcctttgcgcggcccctgctcggaagctttttcggctgggggagctccggattgaatgaagtcctgctggttctggatcgttccgcctccatggatgcccgtccggacaaaaccagctccctccgggatgccatccccccgctggtggaatccacgttcgcgcagctcggccactgccgcctgtccctgcttgattccgccaccggaaccgtgacccagattcccgctccggaagccctggcggatctgactgtaagcaagacaacggatggaggcgcggatattccggcacttctgcaaaaagccatcccgtacctggaagaatccggcgcaggaaagacggaaatctggattgcctcggacatgcaggcctcttcctggaagccagactcccctctctggcccggtgtgcgccagaggctggccgcccttcccctgcccccttccatccgcatcatggccctccgcgacaggccggaaagcaaccgcggcatcagagtccggcaggctcaggtaaataacgggaaactggtgctggacctggaagtgctgcggcagggtttcaaccccaaccagccggaggacgtgccggtgcagctttccgtggataacgcctcctcctccgccacgctgcaactggcaggggaaaacacctccatccggaaagaaatacccctgccgcagggcaaggaatccggcttcggcttcgttgcgctgcctcatgacgacttcatcagggatgacatttccttcttcaccttcgcccccaagcctctcgccaacatcctgattttcggtccttcgggagaagtggggaaaaccctttccctgatgtccgcccctcccggcctgcccggcaggaaagccacgatgcccggcaatacgcgggaagctcaggctaatctggcctcccagtccatggtcgtctggtacgggccgccgccgcgcgcggaaatggaaaaaaaactccagacattcattgaagaaggaggaatagcccttttcctgcctgacgacacggaacacggaacacggcattcattcctgggcgtttcctggggcgcgacggagacggctccgtccgaacaatactaccgtctggaaacgtgggaccggcaaaggggattcctccgcgacggttccgatcagacacccatccccgccaaccgtctccgcgccgtgcgtagaaaacccctgctgggcaaataccgcactctggcctcctgggatgacggttcctgcgctctggcccaggtcagggccggaacggggtccgctctgttcctgggaacgctgcccagatattcctggtccaacctggcggacggccacctgctgctccccctgctccagcgcatggcggaccggggggcggaacgcttttccacctccatttccctacgggtgaatgacgcctccctgccgcaatccgccacggacacccccgtgcgcctggataatgcccagggaagccacccctccggttctccggccgatacggcgggcgtgtaccgactgggagcacagacttacgccgtgaaccgcccctggccggaagacatgcctgaccagattacggatgaaaaactacacctccttctgccggaagcttccatcagttccatgcagagtgcagaggaagccccctccctggtgcaggaagcatggaagctcttcctgttcttcgccctcgcctgcctgctgatggaagccctcctgtgcctgcccggccagacggccaaacgcccctcccacaccacccgtccatgaacctgagccttcaacctactgcgtcaagcgtcatcctgaccgccctggttatggcggccggcatctggatgagctatatctcctgcaagcgcaaccgccggctgctgacattcaaactggaaattcttcgcctggcaatccttggcttcatttgcttcctgctcttccagccggaatggatcatcacctccgccccgcaggaaaaacccaaggtttccattctggaggaccgctccggctccatggaaacgcaggatgttgaaatctccccccagcatgtcgtcacacgcacggcctacgtgcaggaactgctcaagggcaacagtacggaatcccttaaagacacgcatgtagtggaatacgcctccttcggcgcgccacctgcgccggactctccggattatgccatggccggcacagacctggccaagccgctggaggacgccatgcaatcctccgacaacctccgggcggtcatcatgttcacggacggcagccacaacgcctcatcctccgtgctgacgcaggcccagcgcatgcgcaccaggggcatccccctgttcatcatttccgcaggcagcccgtatcccctcccggacctggcccttcaggacgtgaaagcccccacttacggcatcatcggggaaacggtgcaaataccctttaccattaaaagcacgctgggcaaggaaacgcgcaccacgctcatcatgacttccagggatacaggaaaaaccgtcacccgcacggtcaccattccggcccagggggaggtatccgacgcggttctgtggaaaatagaaaaagaaggggcggaaacgctggaactcaaactcccggtccagccccaggaacggatgcacaataataacgcctcttccttcagcatctccggcaggagggaatccatcaaagcactggtcatcgatacactgccgcgctgggaataccgcttcatccggaacgccctgtaccgggatcccggcgtggacgtgcataccctgctctttcatccggaactggaagaaatgggggaaggccccgggtacctggtcaaattcccggacaggatggaagacctggcccggtatgacgtcatcttcatcggagacgtggggctgggctccaaagggctgacggaagaacaggcctccctgctcaaaggcatggtaaaaaaccaggccagcggcatcgtcttcctccccggctaccagggcaggcaaatggaactcctgaaatcggaactgggggacctgatgcccgttacattcctcaacaccaagccggaggggacaacccagccttccccatccccccttatcctgacgccggaaggccgcggctccctgcttaccatgctggcggatacggagggtgaaaacgaagaagtatggcgcaatctgccgggcttcaactggtacgcccccgtggaacggcccaaagcgggaagcactgtcctggctgtgcatgcggcggataagaatgcctatggccgtattcctcttattgtcacccagtcctgcggcaacggaaaagtcctcttcatgggaacggattccgcctggcgatggagacgaggagtagaagacaaataccattaccgtttctggagccaggtggcccgctggatgagttaccagcgcaacatggccgcaggggaaagaatccgtctgattcccaccccggaacggccccggccgggagacacgctgaccgtcaccgccatggtctccgacaaactgggggcccctctccagaatggagaggtttttctggacattacaactccggaaggaagctccagccgcgttcaaatggacacgatggaccatacatggggctcctttaccgcctccgtcaaaatcaaccgccccggcacctggaagctcacagcttcatcctctgcggaaccggacaaatctgttacgcttcccgtcatcaccatgagtgaaacgctggaaaaaataggcagccccgtcaataccgcgctaatgcaggaaatggcctccatcacacgcgggcgcatggtaaaagctgaggaaatacagcggctcattaaggaaatcagggatctcccggtgccgccgcccatggaaacgcgcatcctgctctggagcaacccgtatacgctctccatcctcatccttctgcttaccctgttctggatagggagaaaactcaacggcaccatttgagacgcggatttcccacacctccccggcaggagttttccttccctcccttcccgttattttcccgcagactccctgtccgcggcagcagaagccggctgagaaaatctcagcctcaatcccatttttttccaggccgcggccatttccccctgtacatcctccggagtcttcccatccagcaaaacagcacgcgccttcccgccgccctccgcatcacgaaccctcaaatagcttctgaggcgctccgcctttccgctcccttccaggtggctccagtaaaccatccacaacaaatcggcccaatactgaagcgttcctcccctggaggaaacgccatgctccgcggcggaatgtgctgaatccctggacaacatgtccgccagggccggcagagtttctctgcccgtgcggacggcgcgcggaaccatcgcggccagcctttccggaatcttccggaataccggcgcttccttctccatgggaagaaaagccatgtacgcggaaaagccgtccaccagccagtgatcccaatccatggactgcgccgcccaatgcgtgacggcaaagcgcggatccactcccggcttcagcagctttcccttcttatcccgcaacagcagagccgtgaaactggtaggggaaaacttgagatgcccgttccgcaggcccggagccctgttgaaatcctcttcctggaaacataccctcaccagatacttgcgggagggccggcgggccaccgccagattcaacggaacagctgccagggcagacagaatggtttcaaaacgccgggcaaggatcatacgctccgcttccggcagctttccgggagactccatgatgaaatgatccgtttcatacacactcagctcctccgtctcctgcacggttttcaccagcaggaaaccgggaacaaccaccctctccggccagggagcatcccaattcggctccaggggaacgtaccgtctgccggaatccccctgcacaggaggattctcagcccccacatccgtatcagggagcgtcccgccagactttacccattccagaatatattcctggtcggctccggaaaaaatattcttgggaacagccaccacgcgaccatcctgaagcttcaaatcaacctccgcatcacggacggccaccagcacggctacgacggtagcgccccggtcattcgtccaaatgcgcgcccgggcgcttcccgccaggctcagccctgccaatacggacagaatctttacaggtaaggtcatagggttccctttgcccgcacaagctaccacattgacccgcggacgcaaccctttttccgtctcccgttcttccggaacaggttccttgaaaagaatatggggaaagaatgcatcatcgcctgtcccccggaggggttgacacgctccggcaaaacccataatcttatggaagaaaggaaaagaaggcatgcatatcagtcccctcagaaaaaatattccgctgactgtcgtcaccctggcggctctgggcatcatgttcttcctgtttttcatgcatcccgcccctccggaagaatcattggaattctatgcgccggacggcaatatcgcgggttccttccgggtggaaatcacgaatgcgccttccaaccccgcctatacggaagtaaaaatcattccggaagacatggaatccttccaacggtttttggcccagttccgcaacaaacccgttactgcaaaagttccctcccgcggcagccacatcattgtcccgggccgggacatgcaatacgacggagtcctgcgcctgaccggacattgagagggcaggcaaacagaggcatcttaaagttgttctccctttcccacgtccttcgcccacttccgggccaggaaggaacaaaccatcaactggagctggtggaacaccatgatgggaatcaccagcagcccaatgggggctccggcaaaaatcacgttcatcatcggaatgccggtagccaggctctttttggagccgcagaaaataatcgcaatgcggtcctcgcgggaaaaacggagcctgcgtgaaaggaaagccgtcagccacagggccgcggccagcaggaggccgcaaaaagccagcacctccaccagggaaagccagggcagatttttccatacgccgttaatcatcgcatggctgaatgccgtgtaaataaccagccagatggtgctgtggtctgtccaggaagtgagattccggtgcgtgactacccatttgccaatccagcgctgggcgaactggccggccacaaaaggcaccagaataatatagcagatgttcaggaaagtggaaaaatccacgcccccttcccctccgcgggaccacaccagccccaccagcaagggggtgaggaacacccccagcaggctggaaacggaagcggagcaaatggccgcggccacattgccgcccgccatggaagtgaacgctatgctggactgcacggtggaaggcagcatgcacacatacagcattcccatgcacaaatccggccccagcacactattccacaagggcatgctgaacatacccagcagggggaaaataacaaaggtgctcgcagccaccagcccctgaaggcgccagtgcatcaacccttcccatacggaacggcgggaaagcttggccccgtacaggaaaaaaagcagaacgatggctgcatcactcaggcggctgaacactgtatcccatactccggaacagggaaccagaattcccgcgcccacactggcgatgaggccgatggtgaagcgatccaatttggcaaggaatcccggcatggaaaagaaaaaaggtaaatgccgcctccggcgttctatttgaaacgcacagcatgcttcttgctcaggcgcaggacgttgcccggagccagttccaaaacggcggaggggtctgtcattttcacatcattcaactggatggcgccgggcgtgaaatgctccttgcggagaacgccattggattttttcacctggaaaacattctcaaacaggaaggaaaccagagccagggcattcatgccggcaggcagggaggcaatctccacttccggcaaatccgcggcggccaaatccctcttggaaaaacgggtttcccagtcagaacgcgctgcatttgcagcggcggaatcatgatagcgtgccgtgattttccaggccaggagctttttggcttccatcggatgcaatcccatgtcccgcttctcacccagcagcaccaggtaatagcggtccatcagttcgtcgctggcgctcatcatcttgccgaacatcatctccggagcctcatccacgcccacgtaattcccgtaggacttggacatcttccgcacgccgtccagaccttccagaagaggcatcgtcatggcgatctgcggcagcatgccttcctccttctgaaggtcgcggcccaccaggatgttgaaaagctggtccgtcccgcccagctccacgtccgcacggatttccacggaatcccagccctgcataatcggatactgcatctcatgcaggcgcacctctttacctccctccacacgggccttgaaatcctcccgggccagcatctgctgcatggtcacgcgggaattaagcttcagcacctcctcatacgtcatcttgcggaaccagtccccattatacacgatctccgtcttgtctcggtccaaaatcttgaatgcctgcttggtatatgtctccgcattctccagcacctgttcacgggaaaggggggggcgggtcacggaacggccggaagggtcgccaatcgtggcggtgaaatctccgatgagcaaaacagcctggtggccaagttcctggaactggcgcaatttctcaatagccacggtatggcccaggtggatgtccggcgcagtagggtccacgcccagcttcacgcgcagggggcggcccagcttgagacgctccttcagctcttcgcggctgatcacgacggcggtaccgcccatcaatatgtctaattgctcatctatagtcattgatctggcgcatagagtgccgggggtgccgcgccttttcaagcctatatcctgtgcacggctcatcgaacgcgatcagggggttcccgccaccggtcccgacaggaggaaaaaggaacggaagaacaggagcggattccaccccggagagcggaataaacgacaccccggtgcaggatttttccccgcgcggccctcccgcctgttccatatcacaagaatgatacccggcctccttcctgctgcggaagctccccgcaaactctacagaagctggtacaggcggggataggaagcgtggttggcggttatgtaatgcgggcgcggcttgggaaccggccttgtccgcccgtgattccagccgtcacgatcatgatgatcatggcgcggcggcccggaacggtaatcatcacgatcgtggtggcggtggtggcagcctgcggccagaacgattgaggccgccgcggcaaaaacaggaatgatgttcatcttcatctttcttcatggtaagacagcccggcgacgggaatgcgaacggaaaaagtctgtcacccgagcaaacgctccctgttgacgaagaaaacggctcccaatacacataaaaacgcccacaggtaatcccacttccatttttctccgatgtagaacaaggcgaaaggaataaacacgcacagggtaatcacctcttgaataattttgagctgggctacgttaagcccgccggcactgcccaggcggttggcgggaatcatgaagcaatattcaaaaaacgccaatccccagctcatcaggataatcatcagcagaggcttgccatccgccccggaacccttcttcagatgaccgtaccacgcccacgtcataaaaacgttggagaccaccagcatggaaatcgttaacgcaatcttcatgatttttacttaaaaacatcagtccctggaggacttgggatccagggcgtcccgcagtccgtcccccaggaaattcagcgccagcagggtagccgaaaacaggagcgccgggaacaaaagcaattccggacttacctccatgcggtccgccccttccttaatcagcgttccccatgaagaattgggagccttcacgcccagccccagaaaggacaggacggcttccagcaacatgatgccgggaacggccagagtcgtgtacacgatgacggccccgaacaaattcggagcaatatggcggaacagaatcttcatgtgaccgatgcccagggagcgggcggcttccacaaactcctgccctttcagctccatcgtctgcgtccggacaatgcgcgccagcgtcagccagcccaaagcgccgatggcgatgaacaggggaatcagcccggtcatggggctcaccatttccacagaccagcccgtcatgccggaaacccactgcgtcagcctccgggccggctcctccacggacagggaaaaaataatcaccagcacaatgaacggcagggcaaaaagcacatccaccaggcgcatcatcagggcatccagcctgcctccggcataaccggaaaccagtccgtacgccacgccaatcaccagggaaacgcccgtggcgaccacgcccaccagcagggaaatgcggccgccgtacaggacacgcgccagcagatccctcccaagctggtccgtgccgaaccaatgcccccaggaagggctttccgcaatccgggacaaatcctgcacattaggatgcggcagccacggcagcagaggccccagaaaacaggccgccgcaatcagcgccagcgccagcagggaaaacatggctgcccggttgcgggaaagacgcagaaaggcgtccttccacagggaggagccctgttcctccggcctgttccatcctctttttctcatgattcctttctcaatctcgggttgacggccatttgcaccaggtctacacccaggttggccgcgacgatcagaataccgtaaaacaggacaaggccctggatgagaaaataatcccggtccgtggttgcgttcacgaaatgctggcccatgccgggaacctggaaacaggtctccaccacaaaagaaccggtaatcatggcggcaaaagcaggccccagataggacagggccggaatcaggccgccacgcaaagcgtgcttccaaaccgtacggaaaggccccgcccccttggcccgagccgtccggatgaaatcctgccccagcacttcaagcatgccgccgcgcgtcaggcgcgccagatatgcggcattcaccagccccagcgtcaaagccgggagcaccacacaaccgggagaatcccatccggccacgctcaagccggggacatgcatgcccagagccacgcccagcaccggagccacgacaaaagcgggaatgcaaatgccggccatggaaaccagcatcacccaccagtccatccaccggttcttgtacagcgccgccacaattccggcgggaacccccgccagaatggaaatagccatgcctatgacgccaagctggagggaaacagggaatgactgggcgatcatatccgccacgctgacgccttccttcaccaaagacggtcccaggtcgccatgaaccagcatgttccaccagtaacgcccgtattggaccagggagggctggtccagcccgtaactggcctggagctgctggagaacatgctccggaagtttcttttcccccatgaaggggtgccccggcaacaggcgtatcaggaaaaacgtcacagtttccagcaccagcaggaccagaagcccctgccccaggcgtttcagaatcatcctggtcaaggcgcggcctccttcccatgttcccgggcgtcgtccaggctgatatcctcaaacaaatggttatccagcagcagggggtgccacccccgcacctccggcctcttcaaataggaccgtttggcccaatacaggggaatcaccggggattcggaaagcatcagcgcttccgcacgggccagcagggccatgcgcttctcctggtttcccgtggcgcggctctccgccagcaggcgttcatactccggatgaacccagcccgtattattgttcccggaggcggaaccccacaaatccagaaaactggaagggtccagataatccccggaccatgaggaggagctaaaatcatactgcatggaattctgcgcgaacttgtaggccgtccactcacaggaacggatatccacatgaatccccagatgctttttccacatgccctggatggcttccgccatcgtcttctgaacttcgcgggatgtagtcatcagctccagccgggggaaccccttcccgccgggaaaaccggcctgggccagcagggaacgcgctttctccggattgaactccaccccatgcggcgtcttgtatccggcgccgtccggcgtaaagccgaagcacggctggccgccgccgcacaccacatcccgcaccagggcctcccggtctaccgccagggagagggcccgcctgacccgggcgtcattcagcggcgcacgcgacgtattcagacggtaaaaaatagtcacgtaatagtcatcctggcaaaaatcatcgccgccgcgctcccgggcgtaagccgtcatctccggaggcacgttgttggtgacatgaagcttgccgttgaaaaacatgcgggtttccgtaaagccgttcacggtgggaagaaaacggactccattcagccggacggcggaagcgttccggtaccggggattgcggcgcacctccacataatcattgaaacggtgctccgccatgagaaaaggcccgttccctacggcagctccgggccgcgtccatttccccgtcctgtccagcatgccgccgtgggcttccacggcatggcgtggaaccggaaaccaggtgcagtgaagcaacagcaggggaagctggggcatcggagaacgcagctccatctccagggtataatcatccgcggcgcgcacgcccacgcgggcttcctcccataaatccggctttccggcccggacatcctccaacatccgggccgcaatcttccgcgctccttcctccggcatcccgtccggccactccatcagggaaggatcatcccgcagagcctccagctcaccggctcccataccatccagcctctcccaatccacccgggccaaaaccctctcttccagcccctcttccccggccagccgggaaccgggaccgcacagcagcaggctacgcctgttccggttataggcttccgcgttcttcagcggataaagcatgtccgcgtacctccctccaaaccccggatgaagcaggcggtgataggcatacacgaaatcatgggccgtcacaggaacgccgtcgctccacacggcgtccttccgcagggaaaaacgccacttatccgcctccggactgtgcgtccacgactccgccacagcgggatgaaaaacggcgtcatccctggaatccccgcgcagcagcccctccatgacggcattgatcatcttgaaatcggaaacggaagtggcgatgtgggggtcaaagctctggggctccgcattattgcccacgatgagcacccctgcctcctgcgcccgttccacgctcgtacgcgtatcgcatccggcgagcaaaagcatcacacagaacatcatgaacaggcgcatggcgggattctgtcaggtttccttcccgtgcgcaaggcttcacgtcaagaaacggcaacaactcctgcctttcaccatttccgcagcaaaacacgccgaaaacacgctccacaagagaacagcgtccctcccataagccacaatgcctcctttccatcatcccttttgagtaaccggagaaacagagagaaagcaaaaaccccgcaacggaagaaaaccgtcgcggggccattttcccaaatcaggggaaaagaaaaagcagctttagttatttgctctgcgcctttttggcggcgtcaatctgggccttgatcttatccttgttggcaagaatgccggccttgatgcggggggcctgcatcccggcttccgttcccggcttcaactcggccaccttatccagaatcagaacggcgccgtccacgtcaccggtggaattcagataggtcccgaactccatcatcagcaactgctgctgcgtctccggcagaagcttgtcacggtcgggatacgccttaaccacctgaagggcttccgcaggcgtcgtcttgtccgtcagcttgccggcaagataattctgaacgtccttctgttcctttttaagcaggtcagcatgggcgtctgcggctttcaggccggacttatcctccttgtccagcttcttgatttccgcttttacgtcaccataaaaattgtccacatattcctgaggagccagcttgagcacttccatcagagcggcaaccttcgcttcatccgtagcagccttggcgacattcgcttccgcggcgctcagcgcttccttgttcttcagggcatcctgcatggctttcatcacatcatccccggaacgccccccgacaaatcccccaaaaggcttgccggaagcgtccgcaaacacaacggtcgggaatccccgcacgccgtactgctgggcaagcttttcattggcggctttcatttccttggactgctccttgccgcgcggataatccagctccaccagaacgaaatttttctgcgcttccttctggaagtcaggcttgctgaatacgttggcgcggagctgcatgcagggagggcaccagtcggaaccggtgaactcaatcattaaatcctttttctgttcggcggcctgttttttggcggcatccatatcggtaatccacccttccgcggcaaaacagggagcgacgcaggcggcaacaactactggcagaatttgtctaatcatatctacaatttgatattgtaaaatcggacagcccgcgtcaatcccctgttcaatcatttttagaaaatctccaaaagggtgcgtcttccgcagggaagtccgcatccggctgatgccggaaaaactgatgccccatgggaagacggtgtcattattgaagcaaatcgggagttgcctttcagcctgttttcacttatgtactgaacctatcatgaacacggttttaatcattggagcaggcggcgttgggcatgtggtagccaacaaatgcgcccagctgccggatatttttcaaaacattcatctggcctcccgcacgaaaagcaaatgcgatgccgttgcggaggacgtacgctccagaacgggcgtcagcatcactacccattccgtagatgcggatgacgtgcccgccaccgtagccctcatccgggaaatcaagccgcagctgctgatcaatgtggcccttccctaccaggatctcaccctgatggaagcctgcctggaaaccggcgtcaactacctggataccgccaactatgaaccccgtgacgtagccaaattcgaatactcctggcaatgggcgtaccaggagcaattccgcaacgccgggcttttcgccctgctgggttccggctttgaccccggcgtcaccaatgtattcacggcatgggctctcaagcatcattttaacgaaatccatacgctggacatcattgacgtcaatggcggcaaccatggcaaggctttcgccaccaacttcaacccggaaatcaacatccgggaagtaacggcgccctgccgccattgggaagacggagccttccgggaaaccgcccccatgagcatgcaccagagtttcacctgcccgcaggaagtgggcacctatgaaatctaccgcatgtaccatgaagaaatggaaagcctggtcaagcacatccccaccatccgccgggcgcaattctggatgtccttctcaccgaactacctcaagcacctggaagtgcttcagaacgtgggcatgacccgcattgacccggtcatgtacaacggagttgaaatcatcccgctgcaattcctcaaggccgttctgccggaccccggggacctgggcaagacgaccaggggaaaaacctgcatcggcaacgtcatcaccggaatcaaggacggccaattcaaggctgtgtacatttacaacatttgcgaccatgaacaatgctttaaagaagtaggttcccaggccatttcctatactacgggggttccggccatgatcggcgcggaaatgatccttacgggcaaatggactggcgcaggagtcttcaatatggaacaaaatgacccggaccccttcatggacgagctcaacaggcgcggcctcccctggcactgcgtggaactcacggaagaacaggccaaaatactgaaggtcaaccagcaataaatttcagccagcgctgtaggccccctcaaagccggacattgaatttccaatgtccggcttttccgttttcagcggggaacagaattccccaggacagcacgtcaacgcctgcctcgggaaaaagaaaaagccccggacggcatctttccgcctcagtcataattttctggcgggaagagcaggcaggttgtaaaaatccagtgccatgaaatatcttgcgttatttctcatgttcctgcttcagccggcactggcggaagatacagccccatggaaaatcgcgatcatcggcgatacgcacgactcccccaagcgcatggaaggaagcgagggagtagcagtcaacttcatcaaaaccctctatggggaaatcctgaaacacaacgtggacatggtcgtccaggtaggggacatggcggatatcgaaggaagcgcccccgtcaagggactcgccaaacgcaaggaactcaacaacattctgagagaaaaaggcatccccttttatgccgtgcgcggcaatcatgactcccttcctttccgggcggaacaattccgggaactcttcctgcctacgcggaggcagggcgtccaagggctggccaccagaaaactgaactacggtatccgccataaaaacgcttccctgtatttcatggatattgaccttactcctgaccagctcgtggacttcagcgcatgggttaaacgcaacagaagcaaggccaacaccgttccgcgacactgcctggttttcacccaccgcaccctgcagacgcccatgcaattccgggaatgcctgtggggccgttacaatgacagcgcggcggaacagcaaaatatcttttaccgcaatctccgggatgccggagtgcgcttcgtcatcaccgggcacctgcacgcccatgacctgtatataattacctccccggacgggaaaaacacccttacctccctgatctgcgcccccgcgggaaacaaggtgctccccattccctttttgccgccggcaaaatcccgggtaaaaaccctgcaataccgctccggcattacggcctactatatcctgaccatttacccggattccatgaccctggacacctacgccgcccccaataacggcattaccgacgaaggcccccaaagcggagagttctacaaattgaactcctacgcaattccgatggattagaacatacaacttcccctgtttcttccataacgcggcatcccggaatttgcctgctcccatccgctatgcaccctggcgtccctggcgaaacaatgaaatttccgggaagttcccaatcccccatgttatttcatatgcccggagccacgggacttgatttttctatcgtgctggcgcccccggccgcccttatataaaaactccgtttttccatcgcggcctacagtccggtcaatcaagtctccgatttcctgatcagcgtacccggccttcttaagatacttaaccacttcaccagcctgccccggataaaaacgaaccagcatctccacaaacgcaggttccaatctcttttccagaaaaaatctgcataaactgtttcttttttcattagccaacaacttattattgtagtagaggctgcgggaatcacctcctccgaataagctcagcttcctggcctgcaccaactcccatgttctggcagcactcattttatcatattcctccttcatcctggcctgtttccgctttaattccggatcatactgagtcctgaatgttttcaatacggccgctccatattctgaccatattctgcacaactcctttctctttacgccgcatcgggaaacgattccggatatatcccgggataaaacgctcatccattccacaaccctaaccttcagattataatccatgttgtcgcacaagccgtccttcggagtattctcatcataattcagaggaaatacatccattgaagagacagcgtaaaaaatccatgacaacaccctgacgtcttctgcgttcacatctccagctcccttggaactaaaggcgccaagcctcttccgcgcctcccggcaacaatccggcagctctttttcatgcaacagggaaaggaactccttcttttcctgaggagacgttttgaacgcggagatgctgtcgggcaacggaagccggaacagggcaggctttccttcaccgcacaggatgccggtggaacagacggttaacaacattattttaacgaacggattcatgatgatagtaatatttgttgcgataggttacggtatcccgatccacacagcatccgaatttagaaatcgtcacgagatggtatcgctgcggcccccagatttcctgcctgtaaaattccgaaaaactgaaatggcaccgaacttccatgatttcgcggccgtcaagatattccgttccctctcccccttctccatcatggatgcgccacgaacatacccagtcccacgactgggggaaacgggcatgctccacatctgcggcaaaaatgccggccattacattatcctgcagctgatttgtttctgaaacctccgccgcttcattcgcaccattcctggaatgaccgggatcaaaatccgtaccgggaggctccgagcccttgtccctctctataatcttgacatttttgaagctgacgctggtcggatgcagcgtcagcttcaggacggcagaggcccctatgacggacgttttcccctcaggaagcctttccgtagccattcctccatttttgtgttcggctctgattgccgacggaacaaccacatttagtgtcacctttacttttctcccctcactggtaacagccaggacggttgcggaaccatcacgttgaagccgtttttcgcagtaaccacaatggatattttacccttcgtttcttcaggcatttctacgtatttatctccatcttccaccaaattccattccagttcatcaacatttcccaacggttttcccgtcagggtcaatgttatccgttcccccacacctatcgtctttctttccctgtcagccttccggtcatcagtatttcccaaatatatatcagcggaatattcctctgtttccgtttcaatcctcaacgcgccggaatcctcttcctccacgtccgcataggaaagaccgcacaggaaaactgcgcaacctattaaaaggattcttatattgttaacaacaactgccatcagacgcagatgatatcttattgccatttcccattatttcatagcaaaaagctctaacattccgcatcctttgcctgctaaaagattctgatgctcttcacgccataatacatcgccgcgcctctgttgacgtagtcttccgggttttgcgacaggtccacccagaaaatgaaagaacaccacggggagggaggagagaggggaggaacaatgatttcctgaataccggcctttttctgctccagaatcaggcggacgcgcttttcatgctgcccgaacagaagcagatgatcatgtatggttgaaaaaacacatattccggacaacgccagaaaaacagccacagttatctgcggacggggcacggcaccggggatgccgtaccacatacgaagaagggccagcacgccgataccgaacagcagggtggcggagaacatggcatgatccgccggaatgacggcggcggcgaaagaaagagccatggcataagacgccagaatatatgccgccgctattccaaagggaattttccatgcccggaaagagttccggtctctgtggaattttttccaaagaacccaggcagccgccacgcccagcaacaccggaagagccaggtattcatgcatccggagcaggagcgaagggagagcttcccatctgctccaaaaaccggaaaggggttccgcgcagccgggagtggcggaatgcatccgggcggaaatgccgggcgcaagcagcatgcacagggaacctgccacctgaaacgcaaggcccgcataaaaccacaggggaagtttttccttccgcaccaggcggacaaagacgaacaaggctcccagcaacagccaggttcccggaatattgttttcattggtcatgcccgccggaaatcccagaacagccgcagcggcaaactttccccagctattgtttcttccggaatctccctttctcccggattccgcgtcttccagcaaaccgcggtacagacacagaaagcccagccagacggcggcgccccaggaatagttggtggctccggagagccagtaaatcgtgacgccgggccgggccgtgcacgtgaacagcaggagaagccccaatccgaacagacgcacgtccggccaggaacggggatccaccctgcgcccggaagccagataaaacatcatcagcgcaagaccgacctgcacaaaggggttgagcagcatgaagagccattttcccgccgtcgctacggcaaaggccaggtattcccctattctgggattccaggtcatgtaggaggctacgcagcgctcccagaccaggctgaaagagaagcagtgctccatgcccgtcagggcatgatggtacgtatcggaagtgagaggactccaccagctgagcagcgccgtatataataaggcgactgcggtcagcgcccaaaaccacaccctggacgtgcggggggacatcatcagctcggatccggtttccttttccgcagtgcgggaggcaaatccaggtcttccccatcaagaatgagggggcgcacacgggcaaaaaggccgtggcccgcacgctcttcttctccttcctccggaggcaatccttcctccagctccttgatgtcaggcatcgggactgactccaattccggctccgcctccgtttcggaaatttgcgcaacagacgcggactcccggagcgtttccccttcatccggaatatcggagacaggccttacgggcaccagttcctcttccaattcacgttcatccctcctggagacggggacggaaaggtccggctccggatgccgttccggttcgtcaaccggggcaggaggagcaggctgaataatggttttcccctctccgaggaaagatttttcctccggcacaagcactgtctgcggctccgcttcccgctgaagcacaacagacggggaaacagaggtctctgccacaggcacggcgcccagcacggtcagggacaggcgttcttccggctgctgctccacggaagcgccgatgtggaggcgcactccccttcccagaatttccgccacaccgtccaccaggtcttccagacgctgcagcgtcagggaacctccgccgcgcaccagaaccaggacatcgtccacttctcccaaacgtttttccagaaaaagcggggaatgccggacctggttcaatatatccgccacggaagcatccgcagacgcttcacccacgccaaaggagcaaatcccttttcccgttccggctacgctgagcaggtcgtccaatcccacccggagcaggtttccggaagaattcaacagagacggcacaataagcacggcgcgggcaataagggcattaaccacggaaaaggcttccagcacccccttgtcagggtctatgaggctttccatggcgtcattatcaaaccgcagcaccatgtcggaatacagggcaagccgggccaaagcttcatccgcctgggcagagcgccgttccccctcaaacctaaaggggcggatgacaacgctgacgacataagccccctgttccttggccagacgggccgcttccggagctacgccggatcccgttccccctcccagcccggcggcaaggacggccaacgcgctgccttccagcgcacggagaatggaagactcgctttcacaggccgcctgggctcctacggaggcgtccccgccggaaccgaggcccctggtaagcctggcgcccagatgaatcttgcacggaacggatgaagcgttcaataggcgggcatcaagattcatggcgcaaacggaagctgactggggagccagcagcagcacttcctccattaccttggttcctgcggccccaatgccgcacaggcagatttttccggacaggccggacggcccctggggagagatttccagcatggttgttaatttggataaaggttgatcaggaggtcttctttccgaagaagcccagcatccgtcccagccagctgcgctgctgcggcagttcggcatccagaatctgggcataccgtatcaggcctatggccgtgcagtagcgcggatcatccaggtaggaaggcgcaccgtttttaaccagcgtaggccggctgatggccacgccgaacacgtgggaggccagttcccccacgccgcgcatcaggctggcgcccccgcacaggtaaacgccgtggcagcggttgcccttgaaagtatccttgggcagggaagatttgaccaggttgaaaatttccagcaggcgggaacggatgatttcattcagcacgttgcgttcaatggcggcatccttcatatgcccctctccgcgcacgcgcaccatctcgttggttttcccggaaaagctgttggcgtccccttccgtcttcttgagcagttccgcctgggccagaggaatgccggtcatcagcgtgatgtcattggaaatgtggtcgccgcccaggggcacgcatccggaggccacaagctggccgtcctggtaaagcacatagtccgtcgtgcccgcacccatgtcaataagcagagcgcccgcctgcttgacctgcctgttgagcacaaactgggccgtggcaatgggggcgaaaaccacatccgcaatatccagcgggacttcccgcacgcaacggaaggagttggtgatgcgggatttgattccgtggatgatatggcagtcgatgtccagggttcttccggtcaatccggcgggattggtcaggttctcctgcccgtccacggaaaagagaccgggcacgcggtgcaggacgaattgttccggccccagggcgacgtcccgggcgatttccgtcacctcgtccatatgctcctgggaaataatgctttcatccgggggaagacggaacgttccccggttgttctgccccacaatatgggcgcctgtcacggacagatagacggtcatgatatccacgtccgcatggtcctgggccatattccaggcatcgtaaatgcactggatgaccttggaagtgtcttcaatctctccgcgaaccacgccctcgctaggaacctcacccacgccgatgattgtcacggtcgcatcgggcttcacttcgcccacgaccatgcaagtcttgcttgtccctatctcaagccctacgtgaatttttgtcttagccatgaaaatcaaggaactatcaacgtcctcgcacctgatagcacattactttccattattcaagaaagcctgcgcgaacatacgcagaaaacgcggttttcctccgcgctgccccggttcaaaggcctgtgggatggcgcaccaggaagtgcctggtattgcggccgtccactctccagcgggggccttcgccgcggcgcccgcttcccgtagtgtcaaaccggaggccgcagatgaccatgaagacgtgtccattcttggcataaatggaaatccagtccccggcgcctttctgcccgtaattcaggaaaagcctggaatggcgggtggacgtaagcagaccggcttccttcagcacaaaggaagtgctgccggaacagtcataatgggtatcatgatgcctcctgtgccccccgcccagccggtacggcttgttgaccagggaattggccgccgcaatggcgcgcttgacctgcgaaggggcatttctggggggaatggctttcccgttgtgaagcacggccgtcttgccgggcacaaagtggtaggcgggaagacgcgcaggagcttcaacttgttgctgggaggagcaggaagagagaaaaaggccggccaaaagggcgccagccacggagagagttttgtgggccgcaaatgtcatgagaattataaactgcggaattcccgcctccttggcaagaaaataaatttcccccgtccacattacatggtagacgggggaaagaaatcagcaatatttagccattggaacggctgtgggcatctttttccacggccgtccacagggaatccagggaagcctggactttcgccaatgcttccttcacaggatcgcccggtttcccgtgcccgaagaggtagtatttaatcttgggttccgttccggaggggcgcaccgcaaaactgcggccgtccgccagatctacgaaaatcattttttccgccggaataggatcgccttccgcatccaccatgtcgcccttggaaaagtcccggatgccgctgacggctacgccgtccacttccgtgggaggattggaggaataggaagcggcaagggcggcgattctggccgcgccgtccgcgccttccataaccagcgattttcccatttccaaatacacaccaaactgctcaaagagttcatgcagcagttccagaaggctcttgccgatgctttccgcatacgcggccagttccgcaaagatgatggcggcggagttggcgtccttgtcccgcacgaagtcctgggccaggtagccgtagctttcctccccgccgaagacaaagtaacggctgtattccagacgcagggcgcgcgtctgttcttcgctcatcttgcggtagccctcccgtttttccgccggaatggcctgttcatatttaccgagtttctgggcaatatacttgaaccccgtgaggacgttgaccacttcataaccgaagtggtggccgatggcgtcctgaagccccgtcgtcacaaaggttttcaccatcacggcgcgggaacggttggagtcattgatgatgccaagatcggacatgctcatgcagcggtaccacgccagcagggaaccgatctggttgccggtcagcaggtgcatctttccgtcttccccgcgcacggccactcccatgcggtccgcatccgggtccgtggcgatgacgatgtccgctccggaagcatccgcctgttcaatagccagggccagagccggcggattttccgggttgggggaagcaaccgttgggaaacggccgtcctgaacatcctgcgccgccacggtctgcacgttgcagcccagttccttcaacaggggcacgatgatatggccgcccgtcccgtggaggttggagtaaacgattttagctccccccttgttgaaaagttccggacggagcagcaccgtttttaagcggtccatgtaaatgcggtcaaaggaggaatccagcacatgaagggttccgcgccggtcttccggcaacggttcatattcttcggaagtcagggaattgacctccctgatcacggccttgtcatgcggaggcaccagctgggctccatcattgaagtaagccttgaaaccgttgtcatgggaggggttgtggctggcggtcagcaccacgccggaatccgcatgaagctcccggatagcaaaggagatctcaggagtggcgcgaggactgtcaaacaggtaaatgtcacatcccagatccgtgccgatttttgcgcagaattcggcaaaatcacgggaaaagtggcgcgtgtcgtgtccgatgaccaggcggggcttcctgcccgggtccgtagcctccacatgcttgttcacataaataatcaggccacgcatggcccgccccacattgaagtagttcatgcaggcggttcccacgcagggatattccgggcggccgttcacgccgccgttcccctgctcggcccgggtgacgatgctgccgatggtacgtcctcgcagcccccccgtgccgaaggccaacgttttgtaaaaacggtcgttcagctcctgccattccccggcggcagccaattcttctacggcctcgcgcgctatgggggatttggttccatccagcagaaggcggatattggtccgggaagactccaaaagcttcccttctttaacggcattcatcagggattcgtccagtgtattcatgctggcggaatagtacatcatgccccttgtttgacaatagctctttccatcatggcctgagaaaaaacgccatattcatcccggtgcgggtgcgggaaatgctttcctccccgtccccttgttatttaaagggactggcggtcatacagctcccggtacaacgggcaagaggcataaagctctgcatgggaaccgtccccgacgatgcgcccgccctcaaacaccagaatgcgcgtcgccacgcggatggaactgaaacggtgggccacaataagcgccgtccttccctccaccagccggtccagttcctgctggatcagggcctcgctttccgcatccagggacgcggtggcttcatccagaatcaggatgggagcatccttcaggaaagcgcgggcaatcgctacacgctgccgctggccgccggacaatccgctgcctccgtcgccaagcatggtttgatagccgtccggcatgcccatgatgaaaccgtccgcagccgcggcgcgcgccgcggccaccacctcatcatccgtagcgtcctgacgtcccaaacggatattttccataatggtgccgtggaacaggacggggtgctgggagacgaaggcgatattcttgcgcacatcatgcagggaagcgtccctcacatccacgccatccacgcgcagggttccggaactaacgtcataaaacctggggagaaggctggcaaatgtcgtctttccggcgccgctgggccctaccagccccactacttccccggggcggatatgcacgttgatgccgtccagcaccttgcgggcgccgtcataggaaaaggaaacgccgtcataatccaggcggccggcggcgcgtcccataggaacgggatcaacggcctccggcatggtatccggttctttcaggaggtaattgatgcgctccagggaggcataagcgctcttcaaattggtgagcgtcacgcccagccgtttgagagggtcgtaacacatgaacagggcggcggccaaagcagtgaaatcagccttggtgatgcccatttcatgcccccttaccagcaaaacgcccaggcccagcgccgtcaccatttccagcacgggaaccaggaagtgcctgtacttcaccgttctgagattgattttgaaaaaacgccggatcagccccaggaaaagatttacctgctgttcctgcattccgtaggaacggatttcacgctgggaggccaaattttcctgggcggcggccgtaatattgcccagttcgtcctgagcctgtttggacttcttcatcacgcggcggccgaaaaagcggatgggccatatggccagcgcaatcagccccagattcatcaggaccaaagccgtattcggatcaacgaataccttgtacaccaggaaggcaagggcggtcagcagagtcaggggctgcttgatgatgtcattggccgcaaccaccagccccccctgcacgttggcggcgtcattgataagccggctgatcaggtctccccgtttctggcggtcaatgaaggaaaggggcagcgtctgcaatttggaaaaggcgtccagcctgattgcttccagcactttcatgctgacgatgctgatccagtacacgttgaagaacgtgcctatgccccggacggcgaagaccagaggcagcagggagcatacggccagcagcaccgccatgcgcatgtgttccggggccaccagccgggcgatcatgtcctgaagctccgggggaatctgtgtattgtcgaataccaccggaaatactttggcaatcatcagcggaaagccgaaaccgctggcggcggcggccagagccccggcagccagagcggcaatgaacagcttcatcacgggcttcaaataccgcgcatattcaaaaaactgtcttaacatgaggcgcctccttcctcctccgcaatcatctgctgcttattgtaaagttcccggtacaggggagaagaagccatcagctcctcatgcgtgccgtctgcaaccacgcttcccttctccagcaccagaatgcggtccgccatccggatggtgctgaaacggtgggcaataatgaacgtcgtgcggccggaagccagtttctcaatctccttctgaatctgttcctcgctcttcatatccagggaagccgtagcttcatccagcaccaggatgggagcgtttttcagaaaggccctcgccagggaaacgcgctgccgctggccgccggaaagcccttcccccatttctccgatcatgcgggaatacccttcccccgtctcatggataaaactgtccacggcggacatgctcccggcttcttccacttccgcgtcggaagcgtccggacggccgatgcgtatattatccgccacggagccgcggaacagaacgggatactgggaaaccagcgctatgtgggaaagaagatcctttttacccatctcccgcacgtcgatgccgtccacctccacgctgccggaaaggacatcataaaaacggcacagcaaattaatgaacgtcgtcttccctgctccgctgggcccaaccagggccaccacctgtccggccggaatgcggagatcaatgttcctcatgacgggagagtcctgctgataaccgaagcaaacgttgcggaactccacttcccccttccatgcctccgggctttttggattttccggttcgggcacgtcatccggagcattcagcacgtggttgatgcgttccagaccggcattaagggtttccgccttgttatggacagcccccagcttcttgaccggctcatagcaaagatacatggccgtggccagcgcggcaaaatcccccatgttcatgccgttcatgttgccaaccagcagggtggcggccatggctatggcgctgacgaactcaatcaagggggtcagcaggctctgccacctgaccgcgccgatagacgcctggatataacggcggatcctgtccctgaacagccctatctgctgctgttccagttcaaaggccctgatatcccgctgggaagagaaattctcctggagcgtggaggaaagatccccctggctggactgcaccacccgggcgcgggcaagcatttttttgccgatgtaccggatgggaatcacgcaaacgcctaccagaagcatattcgccagcagaataagaaactgctcgctgacggaggccctgtaaatcagaaaccctaacgcggccaaaagagtcaggggctggataataaggtcattggcaatctgcaccaggccgccctggagaaactgggtatcctgcatcaggcggctcagcaggtctcccttctgctgccggtcgtgaaaagccagggacaaatcctgatactttctgtacaccttgagccgcaatgtctccagcactcccagccctattttggaaagcaaatagacattgacaaaagaagacaggccgcgcaccaccaccaccagcgggagcatggccgccgtggcccacaccgtcaccaggggcaggttttccgggctcacataccacaagagcacgcgttccgcccaggggggcagcggtttcccgtcaaaaatcacgggaaacatctcctgtaaaatcaccggaatgccgaaaccgctggcaacagcggccaccacgcctccgaccacagcccacgccagcgtgcccctataaggaagaagatactcgcgccacaatgccctggcgcgcaggatggaggattcctgcccctctgttgactgtttcctcataagtattccgaatagccgcgcccgggaacggacggcgcgcaatcggcagggatcataccatgaagaccgtgaatgacaagctccttgaaataaaaactgcatgagtaaaggcatgggggcggacccccggtcatcccggcttgcccgccgccccgtaatggtctacctttccgtcgcatgctgaagacaggattcatccaaccggaaaccattcccggccactttccccgaaacctcagaaccatcgtggaactgtaccgctcctgcctggacgcaggcgcggagctcgtcctctgtccgccgctggccctcagcggcgtgcataccggtgaactggctctgcgcagcggcttccggacccagcaccgggcggccctggcctacctggcacgggaaatagcggatgtccccctgctgctgggagcggcggacgcggaaggcataagattccacctgttgaggaacggactttcctttccccggcaggccgttatccctccctccccgcatggaaacgaacgcgtccccgtctttggcatccggagaacggaggatgaagccgttttctccatcgccccgtggggagaaattcctccgccgcacgtttccgccacatgcctgctgctccgcacgtctgcccatgcatggcatgagggattgctggaacaggatgaggaagaagcccgcctgacggcgcgggaaacaggcctgcccgtattcacggcccgcctggccgggggagaaggtccgtttctgctgcccggcgcatcttccgtatggtccggcaacggacatcttctcaaacggctgcgtctttttgaacgggatttcgccgtcatttcaccggaaaaccccacaggaacggacttccccctgccctccccggaaaaacagctccggcatgccctccgcaaagggatggaagacttcattttgaaaagcgggtatggggccgtctgcctgaatttgctggaaaattccgcttcccttctgttggcggaactattgaaggaaacgctgccctctctggcagtgacggggtttatcccctccctgcccggcattccggaagaaacaagggaaaaggttcaagccttcgccggcgcggctggcattggcgtacggacggtttctctccctaacaaaaccgaagggctggacgaaagagccacggccgcatggctcatgcgccaatgggcggaagaagaaggagccctgccgctctcttctctaacgggaacggatatcatgacggagtcccgcttccttcctgccgctttagccgcggatttcatgccgctgggggatttatacgagacggaactggcaaacctgttccccggttttatttccccggctccggaggccgccatgcgtgacgggtttctcatccgcctgcaccggaaacatgaatccgccacggagctggcgaaccggttcccggaatcggaaagggaaatacgccgtttgcagcggcaggcccgcgcatccgaatggacacgcctgaaactgccgccccgcctcatgctgcgctccatccccggaacgcaggaaacgccttatatccatcggctggcagactgacgcggaaccttccttttcctcccgtggcatacattgcgcttgctcttgaagtggaagaagtgattagtagaagccatgcaattccatgtagcaaccatgatcggccgcgccgctttaaggctggttgaccggttggggtcaatcggattgctgctttaccaagtagcttcatgcatgtggtccggccagttccggatgcgcgtgcttgtggagcaaattgcaaaaatcggggtgcaatcccagccggtggtcatcatcaccggcgcgttcaccggcgcggtgctggaagcccagacacttttccagcttcaaacggtgagaatggaaaccatgggcggggccgtcgtcgccgtgggcatgttccgggagctgggccccgtcatcaccgggctgatgcttgcggggcgcgtcggatccgccatggccgcggaaatcggcaccatgaaagtcacggaacaggtggatgcccttaaatccatgaatgtggatccggtagactacctggtgaagccgcggatacaggccatgcttatttccatgcccatcctgatgatggaagccgttctggtgggcatcgcctccgcgtacatcgtcagcgtcaccgcctttaacgtagaccaggcctactggatgcacttcatgagcaaattcgtcaccatgggggacatcatcgtagccctggtcaaggctcttgctttcggcctcatcatttccaccatctcctgccgggaggggctgaacaccacgaacggcgccgtgggcgtaggcaaatccaccatgcaggccatggtgtacgcttccgtggccctgctcatcgccaactttatcctgaccatgatcctcaactctttcttccccatgggattcatgagatagcctttccccgccgccatgcagccattcatccgcgtccatcagctcagacaaagcttcggcacccaggaagtgctgaaaggcgtaagctttgacgtgggcaagggagaactgatggctttaataggaggttccggagccgggaaaagcgtcattctgaaacatctggacggcctgatggaccccttggacggctatgtggaaatagacggcaggcgcatcagcggcgcgccggaaaaaatcagaaagcaaatccgcagcaacatcggattcatgttccagcagggagccttattcgattccctgagcgtgggagaaaacgtagccttccccctgcgggaggcggggatcagggatgaaaacgaactggacacccgtatctcagccgctttggattccgtaggactgctgggacagcaggaaaaaatgccggccagcctctccggcggcatgatcaagcgcgtcgccgtggccagggcaatcattaccactccggaatgcctgctctatgacgagcccaccgcgggcctggaccccatcgttacggacagcatcagcttcctcatccggcaaatctgcaaggacaaaggcatcaccaccgtcattgtctcccatgacatgcccagcgtgatccgcatcgcggacaaaatcgtctatctcagaaacggtgaggtttactggacgggaactccggaagaactgttgcactcccaagacgaaatcctgcaaaaattcctgtacggggactccggggaaaactgggcggccctgtccggcaaaaatgaaaacttccaacgggttctgctggaacgggcggaacgggaacgcaaacaataaccatcttgccacagagccatgaaacagaaacttaaaccggaaacgtgggtaggcatctttctgatcgccgggatcctgatgattatcggagtcatcctgggattcggcaacatcaaaacatccaaggaacaaacctaccccatcaacatcattttcaaagatgcggcggggctcatcaaggattcccagatccgcctgggcggcgtcacggtggggaaagtcaccaaagcccctgaactcctgccttccggcaatgaagtcatgctggaagccaacatcctgagcggcgtgaaaatccagcaagggtccgtcttccgggtggacatgcagaacattctgggcgacaaatacatcgatatcgtccctccggcccagcccacgcatgaatacatccttccccatgccaccatcatcggtcagccggaaagcgatttcagcaaaatcaaaaacaatgccgtgggcgccacagaggaaatcctgaaaatcctcaagcaaatcgagaaaaattcggacaacattgacgacgccatcctcaatatcggagaggcggccaaaggtctggcccagacgaccagactgatcaacgagggcatcctgaaccgggagaacctccagaacctcggcagcgtactgtctcaaataaaccgggcgggagaacagctccccggcctcatggaagaaacgcgctcctcggtcgcagccatgaaagacaccgtccgggatgcccgcaaactcattgccggagctgaagaaaaactcaacactctggaccccgccgtcaaggcaatcccccctacgctggcctctctgaggaaagcatctgaacaaatctcctccttcacggctgatgcacgtaaaaaccagggctttcttgggctgcttatgtacgatgctcgcttccgggccaacgctcaggaattcatccgtaatctgagggattacggcattctgaggtaccggaatcctaacgaaccccaagtcaaaccggatccccgcggcggtttttcaggaagccgccgctgagagaccgcacaattccgggtgaagccgctttacacacttgccaatagtgggaagcgtgctaaataatttccaatgtgagaggcgaaaacatgtaagtcgacatgtttttcaacaggaaccaacccttaatactctaatcaaccatgcaagacaaccaaaccgaacttgaaacgaccgcagcagcaaacgacacttcctgctcctgcccttccgcccgcgagcttgccgtcaccagatttcaacaggccagggccttcgccgcagctaaagtaaaccaaatccgcaaggcggctacggaacaggccagcaccatctgcgactacgcccaggaaaagggagaagtcatccgtgacaaggccaagaagttccacgaagcaggcgaagaatacgtgaaggaaaagcccacccagtccgtgctgattgccatgggcgtgggccttctcatcggtctgcttatccgccgtcgttaaccctctcccttcattccgcgccatgcgtgccatgcgcatggcgtcctccctccccctttcaaaccgaaccatgggactgatcgacaaactcaagcgaaccttcgtcaccccccttgtggaggaaaaggaagaagggatggccatggtccggtccctccgggaaaccgggacggcagccctggcccatgcggaagccctggccgcactgctcaaactggaactgaaggaagcgtccaacaggctgggcaaaaaaacggcctttctcctgatgggcgtcttcatggccttcttcggctatctatttctgtggtgccttctgactgtggtcatggcgtatttctggggaattatcgccgggcttgccgtaaccacgggctttcatctcctggccgccgcagccgggttcatccttttcagccgaacccatgtaacgcctatcgctccggcgacggcggaagaacttaaaacggatttatcatgtctgcaaatggctctcaagaaaagctcgcactcctgatgcgggtagcttcctcccggctggacatcgtcaatgaggcggacagcctggtgcaaaagacgcatcagcaggccgaccacttccgtaaattgaaaaaaaaggccatgtccctgcctgtaatcggctctattgtcggaacggtggcaggagttcttctcatccgcatgtttgcggggaaaaaaagcaatccggcccctcccccgcagccgcgcacttccggaagctgggttaattcctccatcttccgtttcatcgttgaaattctgattaccctggctttcccttccctgaaaaaaatggggatcggcctggccggcaaaaaattcctcaatctgttcaaataacaggcttttcaggccaatacagcggttttctgccgcttcttgaaaaaggttcgggaacccagcagccgtaaaaaaatggggatgttcctgcggcgttaaatgacgagccgccccatatccttcctgccttccagggaacaataaatcatgcctggcgtaaaaagccggcctaccgcgccaatcccctgttccatcatcctctccttccccggaaacaaacgtccgcagatcttccgcaaaacttcccctctcgaaattcctcacccgtcgcggaacagggcaaagtcgctttcatggaaatcggttcccagacattttttgctggtcaaaaaagctctgttttcgttagtatgtagcttcatcagtttgctgcattcacaacatgagcgaatacattttgccccacgtcgacggatatcttaaacttggacaggattacgactgttccgatatccaccttgccgtcaacagccgtcccacctggcgccggttcggccagcttctccccatctgggaggaagcgcccaatctcacgccccaggacacggaagtgctggcgaggggctttctggaagacccggaatggaaccgccttcagcaacggggggacgtggacttcgcctacgccaatgactttggccgttaccgcgcatccgtggttaaacagcgcctgggttatgacatctgcttccgcatcatcaacacgcgggtgcgcaccatggaggaaataggcctgccgacggaatacgtggtgcccctcacccgctacaccaacggtctcattctagtcacgggttccgtaggttccggtaaatccaccacgctggcctccatcgtggacttcatcaaccaggaccgccacgaccacatcatcacgcttgaagaccccatcgaatacctgattccctccaaaaactgccacgtcaaccagcgtgaagtgcataaacacacggaatctttcgcccgcgccctccgcggcgccctccgtgaagacccagacgttatcatggtgggtgaaatgcgcgacctggaaaccatctccctggcgctcacggccgcagaaaccggccacctggtgctcggcacccttcatacgggctctgcagcccgtacggtggaccgcgtgctggacgtcttcccggtggagcaacgcgaccagatccgcatcatggtcagcgaatccctgcgcggcatcatctcccagcagctggttcccagagcagacggcaacggccgcgctctggccattgaaatgctggttaatacgcccgccatcgccaactgcatccgtgaaggcaagacattcatgattcccggctgcatccagacagggaaagcccagggcatgatcctgatggacgactcgctccgggccctgcaccaggcaggcctcatcaccacggaagactgcatcttccgcgcggaagacaaaaccatcatgaaatccttcctgggaatcaagtaacctttaattttgaaacactcctgttatggctgtcatcgaccaatacttcaaatatctcgtagaagcgggcggttccgaccttcacctcagcgaaggccagcctcctaaaatccgcgtcaacgggaccatctccgccatctccgacgaaaacctggaaggccaggcattcaaaaacctccttgcggaaatatgtgatccccaggccttccagaaatatctggaagaaggggacctggactttgcctatgaaatggatgaaacatcccgtttccgctgcaactatttcaagcagcagcacggcctgggggcagttttccgtctcattcccaccaaaatagccacgctggaagaactgggcgtgcctacggtcgtcaaggaattcgcccacatgagatccggccttgtgctggtcacgggccccaccggttccggtaaatccaccacgctggccgccatcatcgactacatcaacagcaaccaggcgcggcacatcatcaccgtggaggaacctatcgaattcgtccatcccaataaaaaatccatcgtcacccaaagagaagtgcctctccagacgccttccttcgcagacggcctccgggcctcccttcgtgaagactccgacatcgtgctggtgggtgaaatgcgcgacctggaaaccatctccctggcgctcacggcggctgaaaccggccttctggtattcggcaccctgcacacgaacaacgccagcaaaaccattgaccgtatcattgacgtattcccatctgaccagcaatcccaggtacgcaccatgcttgcgggctccctccgcggcgtcgtagcgcagctcctgatgaagcgcagcgacaaaccgggccgcgtggccgtcaatgaaatcctctttgccacgccggccgtggctgccatcatccgtgaaggcgccacgcagaaaattcctgacgtcattgtcggcggcaaggccatgggcatgcaattcatggatgacgccatctggcagaaactccagcagggcatcgtctccccggaagaagcctacatgaagtgtattgaaaagaagagattccgcaacttccttcctccggaatccgcccgcctggcagactccggcggcggaaactaaactctttgccctttttctcccgccatgtcccccactggaaaattcacgctcaagcttgtgatttatggagcattcctgctctatctggtgggggacttgtttgtctggcacggctttctggccggcagaatggacgcatacctgaaaccgatgccggggccgccaggagacagctccgcccggatagcggaagtatatggagaacccgtcaccgccaaccagctttcccgaaggattacggaactgaaaatactgcgccagcctcccgtgctggacatggacggagggatcaaacttactcatgaactggacatccccggcgacctgtctcctcgggccaggtatgacctgatcagctcctcccttctgcgcctgaaaaccagcgtcaatgatctccagctgcccaaccgcaatgcggaagcggcccgcgccgcggaacaaatccggtcccgttttgacggaaacacggaacaatacctgaaaaccctgcacgaccagaaactgacgcaggaacaatttcaaaaaaaaatagcggccaggctcaaacagacggaacagctctaccgggcaaccgcccaggcggcggaaccgtccggcgaagacctgaaaacctactacaatctaatccgggatcaactcgcttctcctgacctgcggaaaaccaggcatattttcctggctaccttgaacagggaagaagcccaggtccggcaaaccgcggaaacgctgctggagcggctgaaggcaggggaatccttctcccggctcgccagggaattcagtgaagacgaacgttccgctcccgcaggcggggaactcggctggataagccccgcccgcgccaaggaaaccctgggtctggcgttggcagacgttccggacaacaggccggtacttctcaaaagccggtgggggtggcaccttgtggaagcatcccctgtcaaaaaaggaaaaacgccatcctatgaagaagctcttccggccctgagggatgcagcccggagcctcagaaaagctcaagccgtgggattgtacatggacggcctttttgaagatgcccatctcagaaaccgcattaaaaacaagcagggccgctgacgctccaattccggcaaacgggccttcgcaaaaatcggaaacatcaggcccggctgcctttacacctgaacattcccgcaggccctccggcttccgaaccggggcgttcctcctttcccgtaaaagccgggcgttcccggaaatagccatcttccctgcggccggcttccggcaggcaggaaacacccgcacgaaatgaggaaaggcggcatcttccttcttatttgcctttcctgacgaattccgcttgctttcaaacgcgggatgaactaaattctttccggtatttcccacggggtattagctcagttggtagagcgtctcgttcgcaatgagaaggtcaggggttcgaatcccctatactccaccatccatctctctttcccgccactgttttttattcgggaacaacgggtagccctatgaatggtaacttatttaaaattgtactggtttcagtcgttgccattcttctggccatcataggcggcatcatgtcggcggacggtgatcccctttccatagttctggctgtttccccctttatcctggccgccttattcctgatgaagggaaaagtgtggtatctgtggatactgatacccattcttttcctccccatcccctccttaagggattacgctcccctccttgcttacggaataacccttccttgttacttgtggaacgccatgctcaggcgttcaagcttgacgtggaattccgccccccttctggacgctgtcgtcctcgtgctgttcatgtatgtgggctacatcttcctgagccaccctttcgctctggggctggatgtgctggaagactactacggaggcaagggctacatccttttcctccaggccctcttggcctatctctgcctgtcctcgttaaaaacgaccagccatgaactgggcaaggtgcttcaatgggctgttttcctgaccatcgtttttacccttatcctaaccgcccggagcctcctttctccggatagcgctggggcggatcttgccgcgagcgcgggctccgcaggcacactctccgaaaactcccggaactcttccttcctcagaatttctatcttggtgatgcagctgctcatcatcaactactccgtgtggcagatgatcaagcgtccctggtggggggcgttgcttcttcttggaaccgttggcatcctgttaagcggatttcgctccgccatggcccaggttctgttcctgttcttcaccatatccctaatttacagaagatggttcttctgccttctggctcccgtcctcggagtgctattgctcttgctgctctcctctgcgggcatgctccattctctgcctttcggcatccagcgcaccctctcagccgttcctttcctggacgtcagcgcgcaagccaaggcaaacgccgaagactccatcaactggcgctttgaaatgtggagctgggctctggatgaccgtgaacactttattcaggacaaaatattcggagacggcttttcacgggatatcagcatcgtgaaagccaatgtgtatgaagaagcctacaacctgagcaaagaccaaagcgcctttgcgtggaacggccaatggcacagcggccccatttccacgattcaaacgctcggctacatagggatttccctgtaccttatcctgtccgtcgttggcatgacctacgcatggatcgtcagtagaatttaccgcaaccatcaatacaagctcggcatcctgtatgtttccgccgtctatttcaccaaaccaatcttctttttcctgatctttggggaaagcatcaccattgcgatggacatcatatccctggccatcatcaaagtactctactcctgcgccaagagggagggcctctatgtatcccttcatgtccgcaaggaatacatgccgctcatgatccggaaaacgcaggaaaaacggcaagccgccgcaacggcatccatttccggctgactgttccttcccgggaaaaacaggcggcccctatgcttgaggctggactaattcaaagggagttgctacctttcggggcggttccttttcccatggcagcagatacttcccatcatatcatcggcctcattccgtcacgctggggttcctccagatttccgggcaagccccttcatcccattgcaggaaaacctcttgtccagcacgtatgggaacgcgtctgccgctgttcccgcctggacgccatcgccatcgccacggacgaccagcgcatttttgacgccgccgtatcctttggagccagggccatcatgacctctccggaccatcccagcggcagtgaccgcctggcggaagcggtacgttccttccctgccgccacccatgtcgtcaatattcagggggacgaacctctcattgacccggccctgattgacaggctggcggaagccctggtctcggacgaagccctctccatggccaccgtcgcctgccccatcagcgcccgggaggacctggacaacccgaacattgtcaaagtggcccttgcccgtaacggagacgccctgtacttctcccgttccgtcattccctatgcccgccacccccgcgtagcgccgcctttgcgccatctgggtatttacgcctaccgccgcgacttccttgaaaactatgtgcgctgggccccgacccccctggaacagacggaatccctggaacaactgcgcgcactggaaaacggggccagaatccgggtcatcctgacggaccacgtcagtgtgggcgtggatacgccggaacaggcggaacaggtggaacaaatcttattaaacatacactaggaagcaaatcatgaaatatatcttcgtcacaggcggtgttgtctcctctctcggcaaaggactggcggcggcatccatcggcacgctgctggaacgctgcggactcaaggtaacccttcaaaaattcgacccctacctgaatgtggaccccggaacgatgagcccgttccagcacggggaagtgtacgtcttgaacgacggagcggaaacggacctggacctgggccattacgaacgcttcgtccattgcagcctctcccggctaaacaacctcacttccggacaggtctttgaaagcgtgctgcggaaggaacgccggggagactatctgggaaaaacggttcaatacattccgcatgtcacggatgaaatcaaaaaccgcctctatgaagtcacggaaaaatcagacgtggacatcatcatcacggaaatcggcggcacggtcggggacatggaaggccacattttcctggaagccctgcgccaattcgccctggaagtgggccgtgacaacgtctgcttcattcacgtcaccctgctcccctatatcaaggccgccggggaaatgaaaacgaagcccacccagcaatccgtcgccaagctccgggaaatcggcatccagccggacgtgatcatctgccggacggaatacgacatgagtgaagacgaacgccgcaaaatcgccatgttctgcaacgtggaagccaaaaacgtcattgccttccgcgacgtcaaaaacaccatctacgaatgccccctggatctcagccaggataaaatagaccgcattgtcaccaggcgcctgggactggacgttccggcgcccaatctggcggactggcagcgttacgtcggcagggtcatcagccccagccactccatcaggattgccgtagtaggtaaatacatcgctctccaggacgcctacaaatccatctatgaatccttcactcacgccggtgcggaaaatgacgcccgcgtggaaattctccggatagacgcggaagaaattgaggaaaagggcgcggaggccatgattggctccgtggacggcattctggtgccgggcggctttggagaccgcggcattgaaggaaaaatccagacggtggaatacgcgcgcaccaaaggaatcccgttcctgggcatttgcctgggcatgcaggtggccgtcattgagtacgcacgccacatctgcggcatggatgacgccaactccacggaatttgaccagaaaaccacccatcccgtcatcagcctccaggaagaacaaaaaggcatccaagccatgggagccaccatgcgcctgggcgcctacaaggccctgatccggcccggaacgctggcgcacaagctttacggcaaggacagcgtcacggaacgccaccgccaccggtacgaattcaacccggcctaccgcgacgaactggaaaacgcagggctggtcatcagcgccgtcaatgacgaacacggactggtggaagtcgtggaacttcccgaacatcccttcttcatcgcctgccagtaccatccggaattccagtccgctcccaaccgggcccacccgctctttttcggtctggtttcagccgcgctggaacacaagagccactcttgatcccttcatcaagcccggggccttttccggaatttccattccggaaaaggccttctctttccaggcatgctcacggaccttttcgtcatcgtcatctactttctggctatcttctgcataggcatctatgcgggacgaaggcaaaactccctgacagactatgccctgggcaaccgttccctgccctggtgggctattctggcctctatcctggcggcggaaatcagcgcggccaccttcctgggagctcccggggaaggataccatacccgcaacttcacgtacgcccagctctgcatcggcaccatcctgggccgcatcatcgtcggcaggctctttctcaagccctactatgactacaaggtcgtttccatctatgaatacctggaaaaaagattcgggctcctgacgcggcggacggcctccatggtctttctggtcagccgggtgctcgccagcggaaccaggctctacttcgcgggcattctgctggtcattgcctaccagttcctgacaggcgccacggcggacgccagccagattgtcctgctctacattgccgccctggttgccatctccgtcgccacgacaatttataccgcgatcggaggattgaaagccgtcgtctggacggacgtcctccaggccgtcgttctgggagtctccatgctttccgccctgtgggtactgttctcccatatccccggagggtggagctccatctccgccgccatgaatggtggagacgattggaaattcttctcctggggaaccggagaaggcctggacttcctccaacaaggcgcccgcgtgctgggccaggaatacacggtgtgggcggccttcctgggagcaaccttcatcaccatggctacgcatggcacggaccaggacatggtgcagcgcatgctggcggcaaaaaacagcaaggcgggaacgcgtgcagtcatcgtatccggcttgctggacttccccatcgtcatcattttcctcttcacgggcattcttctctatgtcttctaccaatacaacccggcaaacctccccgccgacacgccgcagctgcatgtgtttccctacttcatcatccatgaacttcccaacggcatccgcgggctgctgatcgccggacttctggcgacggccatgggctccctctccacggctctaaactccctggcgactaccgccaccaaggactggtaccaggggatattcaaaccggaagccacggaacggcagctgctccggtgcgtgcgctggggaacggccgttttctccctgctgctcatcctcgtgggttccatcacagcgtggtatgtggtgcatcacccggaagtccgcatcatccaaatagccctgggcattttcggctatacctatggctccctgcttggcattttcctgttgggaatgctgacccgcaccagaggcagcgactcaggaaacatcattgccatggcggcaggattctttgtcatcgctttactgacggaactcatccctctgccctccggctggcaacaatatgttccggaaatagcatttccgtggcgcgtgaccatcggaactctggttacttttaccgtcggcttctgtttcagaaagcgccgccttcccatgcgctgaacggtgaacgccgttcccccccccggccacattcaggttccgcattccccttcaaacctcccgtcaatgggagtaaatgtgcaagcgaaaaataggggattaggggataaaaatccctgagggggggcgttccctgtccaacggatgcgccgaaactccttctcccggacgcaaaagcgccgctttcccgggaaaggaaaagcggcgtgaaacggaatggaaacgcgctccctttgctacacttcttccggggacagccagcggaaggagacgatattgaactttctgccaaacgccttgttcacggcgctcagctccgtatcctccagcgcgccgctcttcatgttgaccttccgggcaggagtttccgggctgttcaccggatccacgtagttgatccccctctgcaccaccgcttcgcaccacgcgcgcgacagcaccaccccttcgcggttggtcagctccccgtaggcgcgcaccgtaaacgtatcgtcccgcgtcgtcaggatgttgcccagcaccgccagcacgtccgactggatcaggtagccgggggcggccgtatacaccgaccccctggccgcgtcctggttcggatagcctcccctgggcgcgatcaccatgtcggagagttcgtcaaacgtgctgttgatggagctctcgtcaatagccgcctgaagcgctcccttcacccccatttcaccgctctgcaggcggcggttgacaaagtcggacatgttcaggaagggcccccttttcctgacttccttgaccatgttccgggccagggacctgatctgggagtcgctcagggttctcaggtccgaccacgccatggcctccccgtccgggatgccctgggtcacccctatcgagccgtagtcgtccacgtgggacttgtcgctgctggccaccccgaaacgggaaaaggccgtctgggagttgccgagcacggaaggcctcccgtttctggaataaaggattttgcgcttcttgagccccagcagggtggcttcccaggcgcgctgggaggtggagttgacattgaatccgccggcgacggtgaggtacttggaggcatgcttgtagccctcgtccgtcctggcgagttcttcgacgacagcttccgagggtttgccctgaaggtcgggcatgaagcggcggttggcgatgccggaggccctgttggaggaagcgtccgtggagaaagcctgctgaagaacggttttcagttcttccctgcccgtgcccccaaggctggaagggcgggcggccagggaggaggcgaaccaggagtcccagagggcgtcgttgatcatcaggccgtggtcccagaagtcccccagggcggcgtcccccatgatttcgttgtgggagaaaaccttgtcggcaggaagcatgggatcggcaaaagcgttgccgatgcctacgcccggcacgccggactggtaggcgaagcgtttggcgatggccgccctggagtcgctcctgtaccatcccggggtgaggcggcatccggcaaagccggccaggctggagggctgctggaagggaagctccgcggcgacaatcttgttgacctgctcggctcccggccctccgaagggggagagcctggtgccgtcattggagaggatgttggagatggtaatcgggaagaaatcgctgttggcgttcttgacttcaaactggtacgggctgtagaggcgccccagttcggaggcggtgggcatctggcctccccagaaaagggggctggagtgctgccatgtcttggcccggtagtccttgccctccggataggctcctatcacggggggtttgccccattttaccgatactccatagtaggcgatgaaataggggaatggaccgttcggctcaggttctgcgtatttgccgcgtttcgtgccatcttcatcgtcatctcttttgaagttaatccatccatctactggtatttttgtcgcctgcatgatttgttcctcaaatccccagttcagattgagcatcgttggggacatcttagaaaaaacgacagggtccggtgtggaagccccgcttaaacgtgtatcttttccaatttggctggcgtccataatgccagcacccatcatgaaagttcccaattttttggaattggagttgtattcgtccgtatacttatggcacagaacatgattgggaggagttcccaaggaggtatttcctccattccctatcaggtcattatccgtttccgcaaagcgggcccaaaacgtgtacttattctctgttggatagccagatctttcaaagtattgatattgaagacctgtgtatatattaacgccataagaaaccatctcactcatgtcttgcggccacccttctctaaaagcaaaattatccgttcgaatatcatatcccccacttttagatttatatacagcaccattttgaattttgttggtacgagttgtagatggttgggaaaaaacaacgatttctcctgctttaagaacagatacctctcctttcactacttctcctgtaccgtcgttcagccgggaagttttcctgtaagaggcaccgaaatcggctacctgccgatcatgtatagctccgaaagccccttgcgtatatggcgtcagaggatgctccgtatacatttttaagctggaaagaggtccagaggaagcgatgttatccgcaaaaagcatgggtttaaaacgatgttcgccaaagtaagagccccatggatttcctccggctccctgaaatttcatgtccacattatacggattccaccagacataaacaggaacgactgatacagctgtgttaatccagcctccgttttgagattgccgatcattctttgttaaataagaaccgataaaattgtaataacgcagcaggatgggatggcgcatgtacgtgtagcggttgtccatcatctccaggttcgccgcggcatccgccgcaatcagcgtgctgggagcgcttccgttccattgaagggtggcagaggcatcctggccttccctcttcgtggaggagtcccacacgttcgcccacaggtaaagctggttccaggagccaatcggccggttccggtccgacgggttgccgtcctcggacgtgtacggccgcaaccctatgtccgccgtatcgccacgaaattccgcaggcagtttttcttgagaaaatatgatattcaagtctttttttaatccaccgaatttagaatccgatttttctataaaaatcataatataaacctttaagaacagaattggataaaaatgcgatttttcttgtcttatttttctttccaattgtcccggagcctgtttgctctgctcaacgtgtgccctgttgaaccaactttgagcttgcatgaactgcctcttttttgtattggctagagttaagaattggctcttcgcacctttgtgacagcagaggtttttcctcctcacactcgaacggaaaggggcctgccgaaacccatcattttcatgaagatcaaacttttcactaaacgtcctgtcaggcatgtcagcaaggggtttgccctgattgccaccattaccctgatgatgcttttagccctcctcagcgtcggccttttaaccattgcatcttcacaggtccgtatttccgagaaacagctttttgcggcggaggccaaatccctcgccagattttccctggaagtagctttgggccagcttcagtgtgaattgggccctgatcagcgtgtttccgccaattccggcattctttcttccggaaccagcgaaggaaacgccccttatattctgggtgtctggaacagctgggattcttggctcaatacgaataactccgagggcatgaacatctcggccacctatgatacaggaagaaaatccatgttccgccgctggctcatttccgaccctgatttgcgcaggctcagttctctggaagcgggtaaaaacctgttgggcaaacgttctctctctaaccagaacttccgcagcgtcgccctggtgggaccaggcacgatagggacacccgttggagccaggaatcaggataaaaaggaaatctacgcccgcatggtgcgcgtagatgattcctccaagaccacaggactgaaaaagaatgctaactcccgtaaatatatagcctggtgggtcacgggggaaaaccagaaagcgcgtatcaatttgatgccgcatgcttctgaagaaagtacggatgccctgacggtgctgcgttccacttgggatacgcccggccccgatctggagtctctcaatctttcttccgtaatgacggcgggatccgggaacgacatgtccgcagtcagaaagcttatctctcttgattctctgctggccaacaataaaaacggacgtttgaaggatttgggtgacgtttaccacgacatctctctggtttcttccagtttgctgacggattctaaattcggcggtcttaagaaagacctcaacattatgttttcccaggaaaaacttcctgaagaatttcgcggcgatacggcggacatagggttgcgtccgtacacgtccgaggacggcaacccgtcggaccagaaccggccgatcggctcctggaaccagctttacctgtgggcgaacgtgtgggactcctccacgaagagggaaggccaggatgcctccgccacccttcaatggaatggaagcgctcccagtacgctgattgcggcggactccgcagccagcatggaaatgatggacaaccgctacacgtacatgcgccaccccatcctgctgcgcttttattcctttgtaggacttaactacgtcaaacacggcaacaagcatcccaaccgtggaggatggatcgacttccgtattgcggtcattcccgtgtacgtctggtggaatccgtataatgtggatatgaagctgaccggggccaacggaggtgtctggggcgcctacttcggcgagcaccgcttcatgcccctgctgctttcccataatgttaaattcgcatggaaccaactggatgagaatgcactctccaattatggagaatcctgcctgatcccctatttgaacacttcttataacaaccgccaggtggcggatttcggcgcctctttccgaactacggccaaacttaacagtgacggttccaccgtcaagggagagccttccaccttgaaagcaggcgagatcgtcgtttttgcccagccggtcgtttccaatatcgccaacggtaacgaagtttacaaaacaaagcccaacagcggtgatttcaaaccggacagattcccgctcaaagagggttggtcccaggaaccgggacaagtcagctcttatgccgtcaacctgacggacggcgtccgttatgaacttctggacggcagcggatataaccaggtaggcattgccaaggcttccgttatcttcgcggaagataccagccggctcaacggaacgccggacaatcatgttctcgccgtcaaatacggagacaagggtgcctccaaagccctgggaaccttcgtgatgggggccggcctgatggatcccaacaaaatgaacagttcctcttccctgaatgggaaaagcacggcggaaatagaaattttctccaagaccatgccggccatcctcaacctgaactggggtgcctgggaaaaacctcttgttgaccaaattaaacttcccgcagaaatgtgggaacgcaacgaagggaccaatgaagaagctaaaaaagcgggcgaatacggcacgccctctttggactccacgtttgtcgcctactatggagtatcggtaaaatggggcaaaccccccgtgataggagcctatccggagggcaaggactaccgggccaagacatggcagcactccagcccccttttctggggaggccagatgcccaccgcctccgaactggggcgcctctacagcccgtaccagtttgaagtcaagaacgccaacagcgatttcttcccgattaccatctccaacatcctctccaatgacggcaccaggctctcccccttcggagggccgggagccgagcaggtcaacaagattgtcgccgcggagcttcccttccagcagccctccagcctggccggctttgccggatgccgcctcaccccgggatggtacaggagcgactccagggcggccatcgccaaacgcttcgcctaccagtccggcgtgccgggcgtaggcatcggcaacgcttttgccgatcccatgcttcctgccgacaaggttttctcccacaacgaaatcatgggggacgccgccctgggggacttctgggaccacggcctgatgatcaacgacgccctctgggactcctggttcgcctcctccctggccgcccgcccttccagccttgggggcacgggcagggaagaactgaaaaccgttcttcagcaggctttctccacggacgcttcctccaacagggcctccggcatcgccaaccgccgcttcatgcccgaccttcagggcaaaccctcggaagctgtcgtcgaagaactcgccaggacggacgagggctacaagcatgcctccaagtacctcaccgtcgccggcggattcaatgtcaactccacctcccagcgcgcctgggaagccaccctgctggggctcaagaagcgcaaaatcctttattccagaaacgggaggccttccgtgctcggcaactcccagacggccttttcccgtttcggggtggccagcagcgacaagtcccacgtggacgactacggctcgataggggtgacccagggcatcccggacggggaggccatggcgtggtcggacctgagaaccctgagcgactcccagatcaggtccctggcccggaacatggtcaaggaagtcaggaaaagggggcccttcctgaacatgtccgactttgtcaaccgccgcctgcagagcggtgaaatgggggtgaagggagcgcttcaggcggctattgacgagagctccatcaacagcacgtttgacgaactctccgacatggtgatcgcgcccaggggaggctatccgaaccaggacgcggccagggggtcggtgtatacggccgcccccggctacctgatccagtcggacgtgctggcggtgctgggcaacatcctgacgacgcgggacgatacgtttacggtgcgcgcctacggggagctgaccaaccgcgaaggggtggtgctgtcgcgcgcgtggtgcgaagcggtggtgcagagggggatcaactacgtggatccggtgaacagcccggaaactcctgcccggaaggtcaacatgaagagcggcgcgctggaggatacggagctgagcgccgtgaacaaggcgtttggcagaaagttcaatatcgtctccttccgctggctgtccccggaagaagtgtagcaaagggagcgcgtttccattccgtttcacgccgcttttcctttcccgggaaagcggcgcttttgcgtccggagagagggggaagatatcagggcagaaaggacgaaagacgattttcccctgttccggggatagtggggctttcttccttttccccctgccttggacatctccgggagtttcgataagcccggaaaaaaccggatcgacttattgaatacggagccgacgtttatttccttttaagttcaacaagagctccgtaatgcaacacatcaaattcggccggggcaatttcaacaagcagtttcatatgctcttgttcccatacggccgttttcctgaaatccagcccctaacctgcatgaatgatctgcgccgcctctccgcgcgactaaccacaaaccttcttatccgcgcggccgccggccaggcatttgctccaccacgcatggataagactgacatttgatgatgctccttgcctatatcctttccttaaaaaagaaatcccattgtctttaggaattttatcccaggcatccctactttgagcttgcacggacatcttcattcatgtacttcacaaaggatatcaaaactattggaaccatcagcacacgctgctgcacggttcaatggattttccctccgcctttttcccgcgcggttatcctccaagggtcactgccggggaaaccaaaacactcttttcctcattccacttcccaaaatatatgcgtattttacccctcctggcctttacctgccttttcggaagcatctccttcgcccaaggacaaagccgcgcatcctccaggccggaaccggcccagccggcggccaatgccccggcgtccgatactgtggacaaatccctgccccccgccgccgtcaacggcatccggttcgttctgaaggagcccatgtctcttccttctcccatttacatgcctattgattccaaaaggctggaaaaagtggaaatccgcgccgcccttccggggcgccgcagcgtctaccccaagagcaagatcattaccctgttcgggggcctggaccagaaaggcatgccgaccaataaactcgtcagcaagcccctgccgcccgatcttggctccaaaaccctggctctggtcggcaaaaacagcaaaggggaattgacgctggattttattaatgagtcggaactgccgctgaactgcgtttacatccagaacctgaccggacgcacgttcactttggaacttcccaaacctccctcgggagaaaagagcgctatcgaactgcccagcaaatccacttacattttcggcaagaactccacagacagcaacatttcccgcaccacccccgccaatttgacgtacatgacccgtttaaagaacggcaaagtcgtcaaggtgaaggacagaggcatgatgctgacgacctacccgggacgaaaagtggtcatgattatttccccggattccaccggccgcaccgtcgttttgacggaactgatgattttcaaggaaaggccgggggcggcttcctctgacaagtaaattttcttccgatatccgggaagccggaagttgctctggagtatatccggatgattcagaaaaacgggcattgctgcccgtttttttatttttcttctcctgacgccatggattgagggaataaaccactccggacatttttccagcacgggaacaatgtccgccctgtttcccgcggctccaatgcggcaggctgagaaagaggtctcgaagccatgcggtttgccgaaaaagttcacctgccgccttccggcatccgggcaggcttaataaactttgggcaccaggccctgacggctcatcttatcctccacctttcgccggttttcctccagacgccgggcgtcataggaatcatccacaggctgggcctccggaatgttttccccgcgtcccgcccggtattgctgcacctgcgggagcactccttccaccagttccctgcatatccaggaaggcaggatataggtctccgtgcgtccggcccggctcagagccagcccaacaaattttccgttgacgtcaatgaccgggcatccggcccgttccgggaacaaggtcatgtccgactggataaccaaagggaattcatcccttttcaagctcatccggttgcccatggagttcatcatgtcgagacgcttttgcgggaatttcatcaccctgggcctgggccccgtgaggagttttccttctatcacctggttccgccgccttacttccacgggaaccgtctcaccgggacgcaccccgaccatggcggcacggatggagtacattccgtccaccggctttccattcagcttcatcagcacatcgccggccgtcaatccgctgcggtgcgcgccgcttccggcttccacgccgcctatcataaccccctccccgtcccagcggggatcggaaacaatgccgagataaggctggtcatccgcccgcaggctgcgctgagccacggaaacgactccgaagtcgctcacatgccccgtgggcgatacggctgcaatcacgtccccttccttcgcctgcacataggaatccaggtcaatggggggagcgggaagccccggcacatccatcatcagcagatcatgctccggaagggcaaagagcaccttggcgtcataaacccgcccggaagaatccaccagcatgaccggacgccgttccttctggagatcgctcagcttggtgaggacttttccctttcccaccactgttcccaaagccacctgggcattgccggcaaccagagccactacggactgccccaccggaacagccaccttgtcccattcccggaaaatcttcttggcctggctgtccagcacgcttttgtcctccggggcaatcatctgctccggaggcagcggggaagctatttcctgggcatacgcggaagccgccgcaaatgccgcccataaatatttcatcatcatccttgagtttgttcctggtatttcaggccggacatcaggtcgccacgcctgccgaatgtaagatccgccttgtaagccgtacctttcctcaccaccaccaatggaacggtttcccccggacggtgcctgcccagttcacggagcatatcccgcacggaacgcaggctccggctgtccatgtgggtaatgacgtcccccggctggatgccggcggtatccgccggagaattcaccacaacgtcttccaccaccacgccgtccacgcccagcacatccatcatggcaaacccgagcacaggagattcggggtccgccatgggatgaaggcccagctggccccaatgcctgccggagagcagtttgtcccagtctctcctgaaaacggaaacagggacatggttgttgattttcaacatagggccaatggaggaatggatgccaaccaacttgccggacaggtcaaagaggggaccgccggaatctccgccaatcagcgtacattccgaaataaggaagcgctgctttccgtccgtacacaatcttcccatgcggatgggcgcgcggcgttccgggtcaaatcccttggaatggcccagagccaccacaaaatcccccacatgaagaccgtcggattcccccagttccacatgaggatagtttcctccgtccatgatttgcaccatggcggcatcccgcgtgaagttggcgcccagcacccgtcccttgactacgcgcccgtcggcaaagaccacacgcatgatttcatcgccgcccacgacgtgggccgccgtcaaaatcaggccctgcggagagacaatgacgccgctgcccgtctctcccccgtcggaaaccagagccaccgtagcagccgtaaccctggaggccacctcatgcacatgtttctgcaaatccgccatggaagaaacattccccgcaaggctcgccccccctgacagcagggacataagtcccccaacgaccaagcaacaaaaactcgtcattctcaatagtgatatcatgaaattaccgataatcgaatgataggacataccctactgtataaacgttcaaaacggcagaattttgtctatggattgcgacatggcgccccatcttttgcttagaccatttcggttatttatgataaactccggcccacggatgggtttaaacgacaaatcaaggaaacgaaatgccgcctcctggagggaacgcatccaagatggagaaatgtcttcccgttcccagacggaacgcaaaaaaaggccccttccccgtccatcctatcccgggttgccgcaggaagctcctgatccggctgtcattcccggccctacccgcagaacggggaattcccgcaacggtccttcccggtatgacacgccgccccagcgacggacctcccgcccgtctccgaaggaagagtacgaagacaatccggaaagagaagaagaaaaccgccccgcacgcgcaggaaccatgcgcaggccgcgtttcacgattttcggagccctgctgtttgtcctgctgatgccgttccgcttcatcggctccctgacgcggaatatccgctggttcatttgctggcccctgcgcatccttctgggatgctgcttcgtcggcatcgtgatcggagccatcctggtgtttctttacggcgccatttccaaccgctatgacatttccgaggtaaagagcaacatcccggaacgcacggtgattctggaccgtaaaaaccggaccatcggaaccctgcacggggaaaaccgcaagcgggtatcccttcaggaagttcctcccgtttttattgatgccctgctcctgcgcgaagacaaccgcttttacgaccatggcggcgtggactggataggcgtgggccgcgcctttgcgcaggtgctcaagcacaagagagccacgcagggggcttccaccctgacgatgcagcttgctaaaattacatataaccaccgggagcgcaacctccattccaaactgacggaagtggccctggcgaaacgcattgaagccacttatacgaaggacgaaattctggagacttacatcaaccgtattttctgggggcacaccttcttggggatagcggcggcggcgcggggatattacgacaaggaaccccgggatttatccctggcggaatgcgccaccctggccggcattatttacggcccaaatgatttttcccccatcaaacatccggaggaagcaaaaaaagtgcgcgatattgtccttggcctgctgaaaaacgaaggcaagattacggaagtgcagtatcaggcggccctggcggagcctatcgtcacccggacgccccagtcccggtctgaggaaaattacgccatgggtctcgtgcgccgggagctggacgccattctggaggaagaagacatccgcctgggagggctggtggtgcataccacattggaccttgatctgcagaacgccacgctggatgccatcaataagcacatggacgcgctggaagcccgcaaagatttcaagaagcacctggcctccctgcaggccaagagggagaagaggggaattctgaaaaacaagctgaccaccaaggcggaatatgaggcctccctggccgcctggaaggcgctccctgcggaacagaaggaaaagacgcagccgccgatgcccaactacatccaatccgccgccgtagtcatggacaatgccacgggggctcttctggccgtcgtcggcggccgggacgcggaagaatccaagctgaaccgcgccattcagtccaggcgtcagaccggctccctgttcaaacctttcatttacgccacgtttttccagcagggcaattctgcggatacccgcatttcggatgacaggattgcctatggggaaatacgcggagccgccaactggtccccccgcaattcggacggaacgtaccggggcatgaagccggcctccttcggcctcatcctttcccgcaacaccatgtccgtgcgcatcggcaaccgcgccggtttgtccaatgtcattcaatccgcacaactggcgggcttccacggaaatatttcccgcaccccggccctttatctgggcacgtgggaagcgtcccctctggacattgccagcgcctacagcgtttttgccaacgggggcgtacgccccacaccgtacatcattgaccatattacggattcccagggccagccgcgcttcgccatcaccaagagcaagcgcaccgtctattcccagcgggcggcgaacattacctcttccatcctccagcaggtctgcaagcccggaggcacggcaggcaaaattaccacgctgggctttaaatccccctgcggcggcaaaaccggaaccacgaataattatacgaacgcatggttcgccggatatacgtccaacctcacctgcagtgtctgggtggggtttgattcctccaccaaaattctggaaaaaggctacggaggcaccctggccctgcccgtctgggtggacattatgcttgccgcccagaaggaaggctatcccgccaacgccatccgtacgcgtcccggttcggaagggcaggccgtactcgtctgccgggaatccaatcaactggcccattccggctgccagtacgccaagactgcgtattttgaaacctccgcaggctaccaggcccccgccaacatgtgtgaacggcacattcccatggcggaaccggattcggaagagagcattccctatgcggaaccgctggacggcagcgacgataacatccccctggccgaacccgtggaagaaacggacggcattccctacgccacccccatctgactgcttatttttgggccttatatacttgacttcggttcctccgtatgctattaattagccatactaaggaggcaaccatgaacgaccgcttaactatttcactttttgagctttttgaaatattccccaatgaagaatcggcaaaaaggtatttagaggaaaaacggtggggtgataaggtagtttgcccgttttgcgggaaaagtgaaaagcagtatagggtgaaaaggaatggggttgaggggtattttgaatgcggggagtgcgggaaagtttatactgtgaggactggaactatttttgagagaagccatgttccacttcataaatggatttttgccttctatttagtagtgacttccagaaagggtattagctccatgcaactttctaaagaaattggggtaacgcaaaaaacagcgtggtttatgcttcaaaggattagagaagcttgcaattccaaccatgatgacgataacggctttctgtctggaatcgttgaagctgatggggtgtatattggaggcaaggaatccaataagcacgaatcgcagaaattgaaagcggggcgcgaaattgtaggaaagacggcggttttaggaatgagggccagagcgggaaaggttttggcaagggttattcccgatacttcaagagatacagttcatcagattctcaataagtatttgagccgggattctgttctggttactgatgaacatgcttcctacaaagagtcacagttcaatcatcaggtggtaaaccatagtgccaaacagtatgttgacggaatggctcatactaacggcattgaaagcgtatgggcggttttgaagagaggattctatggaatctaccattcattcagcacaaaacatttacagagatatgtagatgaatttgcttatcggttgaatgaagggaatgtgaaaatccatacgtgggtgagattggatgctcttatggctagagcattttcgacgagaatcacttacgctgaattgaagaattgaccgccaccctgagaataaggtgacggccactcatgcaaatcaaagaatcgcccccttccccgaaaggaaggaggccagttaattcaccgccgaaggaggtcagaaggtccagctaaaaccaactgtgataaaatgatatgggtcaacatctgaccagtatttcgttatttcatatccaataacgatatctgtcttttctgcgacagcaaatttgaaaccgattaatgccgagtaagttccgctcgaatcagattcagacgctttttccccgcctaaggaaacttcctgtttataatagtgaaggccaatcttgccgcctaaatagaaagtggctgaatcagataaggggacattaaaggaatatccagcagtaaagggaaatacttcttgcttccacttcagcacgccgccgtaggttttagagcctgtaagcgcgccgagattgaaagatagttcatggaaaacagaacccgatggaatatttgcgtgaagtcctaattgggcaccgtacaggtctggcatgtctattccataatcattccccgaatggaatccatacatacctttgatactcattccaaaattggaatcataccgtgttgaatatgcggagctataattccctcctaccctataatagttccaagggtcaccagaggcggcttgggcggtacatgagaggcccagaagccccaaactggctatgattgttttcgagttcatgatgtttttaggttttggattccttagagaggacaaagaattatcctaatgagatataatattgcccaataaaagagctattattatcctaataggattttgtcaaccctaaacagttcggattcttccattcatcctcctgataggagaaaattgcccgcatggacgagaaacgcccgctggatattcagactttgggaaggtggttagaaaagaacaaagtgtctcgcaccgaactcgcttcctccctaggtctagccagaagcaccattgataactatttctccaagggcagtattccgaagcacgtccagattctgatttcccgctatatgaaaggacgggaacctgcttccaacaatgactttgtttctcaactgagcgttcctatccctaacaaaattctcaatttggccgttcgagcggcggttcagaaggatatgagcgttgaggaatttgtggtgtgggcagtgagagaggagacgcgcagaatgatgaatagaaggggggatgattagaatacaccctcacgagaaataagaaaataatcagttgacatgtgtaaaaactattgtaagattcaatcacaaggttgttactggttgcttagtgtaactagccactgaaacatgtggtgaaggtgacaataaattctattcaaccacgctcgaaaggcgtggttgtcttattttataaggggattatgtctgttaataaaccgtggaactcatttcaagagcaagcgaaaaagctcatcaatagaaatcttgaagcagatgaagaggagcttacagaaaaactaaaatctgttaattactataggttatcgggttactttcatactttttatgaaacagattatacaaaaagcccaccaataaaaatagataaattccgaaaaggaacatcttttaatttagtatggaattattatcgttttgaccgcaatttgcgtttccttgtagttgatgctatagagcgaatagaaataacactaagaacatctatagcttattattggtcttattattcaaaatgcaatacgccgcataaaaatattaattctttttcaaagtttcagaatatgtacaaaaatagtaaagaagaatgggctattcattataaacaaaaaacttccgatattctcaatcttccagtatgggtattttgtgaattatggtcatttggggatattcggcacattttctcaaatagattaaatacaaaaattcgaagggcaatacataaacaatttaagattaaaaatgctgatttttttaactacattctttatgttctcaatgctattcgtaattctagcgctcatcattgtcgtatatggaataaacaatggctatctgataatcaaagattcgacattcatgatgccatatataaagaaggtggagattggaatctaatatggaataagacgaaagaaaattgggagattcctaataaattgactcataatactaatacctttataagttggaataaaaattctacggcctttgtattaactatttgtagatatttattaaaacaaattgctccgcaaagtcggtggaaacagcgtctatatgatttattgaatcatcctgatacaccaagaaatgttattacagaaatggggtttgtcggagaatggaaaaatcatccaatctggaaagactgataaaaagattttacctaacttaagtacataaatcccttattttttccttatgatttccccattttttccctggttcctggcctttcttctgctgatagcctgcgtggcgctgctggttctgttgctgcggtaccgggaccgcaccgtccgcctcgaagcggaatcccgctcctggcaggaacgggcggaagacagaacccagatgctccgccgggcggaagaggtgctgaaagattctttcgccggcatcagcgcggaagtcctccggaactcggaaaaacagttcctgaacctggcggaaacgcggctgcaaagccagcgccagcaggccaatcatgacctggattcccgcaaacaggccatcgagtccatgctgaagccggtgagcgaatccctgaaactggtccaatcccggctgggagagatggaaaaggagcgcgtgggcgcctacacggacctgaaaacgcaaatccgctatattctttccggcaatgaagccctgaaaaatgaaaccgccaggctttcccaggctctgcaccacaacagcgttcgcggccaatggggagagctccagctgcgccgcgtggtggaactggcgggaatggtggaatactgcgatttcacgactcaggaaacccgctccagggaggaggaacggatacggccggacatggtcattcaccttcctggaggccgttccatcatcattgacgcaaaagcgcccatggcttcctacctgaatgccgggcagacggagaatccggaagaacgcagccagtggatggcacgccatgccgcggacgtcaggaggcatttgcagcaattaagcgccaagaattactttgcccagttttccccatgccccgaattcgtcattatgttcctgcccggggaatccttcttccaggcggctctggaagcagaccccaccctgattgaattcggcgcggagaacagagttattctttccactccatccaccctgattgccctgctgaaagccgtcgcttacggatggaagcaggagcagctggcggataacgccaagaaaatttcggaagcgggagcggacctgtacaatacctgctctatcctttccggtcatttttcctctctgggcaagagcctgaaccaggcggtagcccagtacaacaaaaccgtttcctcttttgaacaccggttcatcccccgggcccaaaagttgaaaaacctgggcgtcacctccacgaaggagcttccccgcgccctggaagacattaccgaacaggccaaatctgcggatgttccggatattccgtcctgaaagagcaacaaccatgcggcttttccctccctgcccatttccgggccgggaaaatacagccctaaagaatcccccgcagacgttttcctgcgcctgaaagaatcttgatgatacagaggaattcggtttccggaactctgccccagccggaactttcaagaatttttatgagcggcaacgggaaacggcaggctgctttcatcatgcagccgggcagataattcccccgcggcggcgcacaccggcacccggaaagcgtccagagcggaacgggaactgtagccccaccccaccagaacaagccgtgttccggcgttcacggccgtgttgccgtcatgggcggagtcccccaccatgcacacctgcgccggctccctgccccaggaacggacgatggacagcagggagtcaggttccggcttacgaggaaagcgttcggaaaaacccatcacctcccggaagggaatttcaggcaggatatggcgcaccagcggaactgtaaccgcatggggcttgttggataaaacgcccagaggatagccttctccagccagggacagcaacatttcccggataccggggtacggaaccgtgccctcctgccaggtgtgcgggtattcacgcatgaatccccggtgcaccgcttcaaaagcttcctccggcacatttccgttgaaatagcctttcagggaagccaggcaaagctcccgggcgcccttgcccaccatttcccggatggcgtccacggaatgctccggataccccagcgctttcaaggccaggttcaggccgcgggcgataccgggaatggagtccaccagcgtcccgtccaggtcaaaaacaaaacccgttttcatggattcaatggcagaacccccgttcggaagtttccacgaattggatgattctcctcaggcaggcattttccgcataccccgaatgccgcagttcctccagagcttcatgaacggtcagctttttattgacgaagagctttttatagcacatgcgcacggctttcaggtcttcttcggaaaagccgcgcctctgcatgccgatggagttaacggagcgcgttacggccgggtggccctccacgatcgtgtacggcaagacatcctggctcacgcgagccatcgcccccaccatggcatgttccccgatgctcacaaactggtgtacggcgcaacatcccgccagaatggcgtaatcccccaccgtaacatggccggcggcggtagcgaacccggagaaaatcacatgattgccgatctggcaatcgtgcccggcatggcaggaaaccaggaaaaggttgttattccctatccgcgtcgcgccgccaatgtccgtagcccggttgatggtggcgttttcccggaagacgttgttatcccccacttccagataagtcggctctcccttgtatttcaaatcctggcttttcaggccgatgacggaaaacgggaaaaattcgttgccgctgccgaaggaagaaggaccgtcgataaccacatggctgtgcagcacgcagccgggccccagtttgacatgttccccgacaacgcaaaagggaccgattttaacatcatccgcgatctctgcagcaggatgcactactgccgttgggtgtatttctggcatggctgaaacaagtatgaaacaaattcaggtgattaaaagcctaaaccccgcacggccgcctttttatcacatttggccggaagcggccgcataagcctccatctcaggcagccagggaatcagcagaacgtagatgagttgaaggcacagaatgaccagcgccagcgtcatcaccactttgcggggcgtcagggggctgttcagcacatccgtagtccccagcttcctgtcccagggagtgaagccgaagcggcgcacccaccaccaggaaaagaacagggccagcagcatcagggaaggagcaaaacaccccaggccaagcaccatgacgaacagggagcgccggaatgccgtggggaaaaaaaggcgccttccccggtagtccctgacggaaacgcccagcatggcttttcccggggttgttcccaatgtaccaagaaaggcagtttcaacgagaaccatcgggaggcagaggtaaagcagagcttcataggaaccaggaaggaaaccgggattgaaagccaggccggaaactctgagcacggacaaatacagcgtcatgtgcatcatgatatccgccattctgccgagaaaacggacgtacgcatacggaaccaccagcggcgctccctcctccgaggccgtccccccttcttcctgcgggcaatccgcatccgcggcaagcgccggggactgctcttcccctgcgttttccagtccctcttcctcccggttccgccgttctccttctcccctgctgacggcacctgcccccttcaatgccggaaggtcacggatacatacccattccgggcacccggcatgccacgcccgggcgttttccggaatgaggcccgcctccagcatggaaatgacctccacttccggcagaggccccttccgttcatgaccctgaatccagtaaatatccataggcgattcctgttacatactgcgcagggagcgggccggatcctggcgcgccgtgatcagggcaggaatgatggatgccaccacgaccatgacaaaagctttcaccgcctgccatgccagctccgcccagtcaatcaccaccgggatattcgccgtgccgtggaaggccacggggaacgggtcaaagcctattcccgccagaaaaccctgaatctgcatacggtattccagcaccagcagccccagccctacacccaggagagctcccacaaaaccgatgatgacgccctgccacaggaaaacgcgcaccacctggaacggagtggctcccaaagccttcatcacggcgatttcctttttcctctggatggaaacggtaaacatcaccgccatgatgcaaaaagcggaaatcagggagatgaaggacaggacaaagctcatcatcatgcgctccttctgcatcagttcaaaccacgcgttaaagcggtcatgccaggtttccagcgtccatgcggaagaaggcttctccttttccagcgcctgcatcacgggggccagcatcgtttccacatggtaagggtcttccacgcgcagggccacggcctgcaccacgtcatcctcataacccagcaattcctggccgatgaccagcggaatgaaaagatccgggctgggcgtatgctgggaggcccggtaaattccgatcacctccaggtctttcggcatcaccagctccttgattttccggaagcattccatatccgcctcatttcttgccccggccttgaaaccgctcaaaacggtttcccattccttccgcgttccttgcggaaaggccaccctgccgttgtccgcaatttccccgtcgttcagcacggcaagcagatccatcaggctggaacgttccgcatccctgcgcgggacggacaacagcccgttaagcagggaaaacgccctgtccacggaggctctgccggccatttcacgctctccctccgtcttcaggttctttccccactctttcaaatccttgagttcccgcgcgtttttctccgccagcatcggtagctccgtctgctggtaggcgtgggaaatttcctggaaattgcgggtcgtataaacccggataacatcccccacattcaatcccatgttctccgccacgatggaggaaaccacagccttttcccccatgtccagttccgcatcgccagctaccaccaaacgcttcaaatcctccagctgggcggcgttttccgtatcaatggcccggaaaaagcagggcctctgccgcccctgcacatccaccagcgcatagtcttctatcagggcgtaggcggactggacgccgggaacgtgcctgagtttctcccccaaatccagccagtccggaatcacttccctcacgccgaagtcgttccggtaacatacctggacgtgcggggagtgcgcaaacagattcccctgaatttccttctggaggcctcccatgacggacaacacgacgatgagcaccattacccccagagaaacgcccagcaggcaaatcagggtaataatggaaaagaaagtccgcaacgggttcaaataccgcagcgccaggctcaggctgatgtaccggctcaataggttcttcatgaataacgcggcacaccttgcctgattgcgctcccctttccaagcctaaaacatgttccggaaaacgggcggcctttcttctgccgcgcaatcaggcagaaaagggacatcccatcttttcctgcgttgggaactttcctgtgccccgcgcccggaaaccatcccgcgccagaattattccctgcatgcaaacggatgggaaaaacaggagaaaatcatcatatcctgttgacttctatttttataggtgtatccataggtttaattgctaaatggcgcaccttatcacaaaattattgttgataaacagaaattatttaaagatagccaattagaatgaaatctaacttttccatctgcaacagcgtccggggcaatcatcatcttggttttaccgttacgccggttttacagaagagggagggcgaatcgtccgtctccttttcctataatcatgctgctccgtcctatcccggagacgtgatgccggaaacctccaaacaaattcaagtaggggaaggcggaggggatacccgtctatacgtactgacggccaccggcacggtggatgaccaggccacgatttcagtagcggggcaaagctatacgtcaccctcaggcgccggagtaagaattaacggcagcttccccggcatcaaggccgggttttatacagtgcccgtctcccacatcaacattgactatcctcccagggggaacgtctccttcctcagttgcaccgtaggcccagccagcgccatctccatcacgcctgaagagaacgacccgccgcaggaatgcgattgcgactgcccgccgtgctcctgcaattcggacggtgaaactgctcccggaggcgcccccttcagcagcggcgccccagtcagcggccgctcctccctgcgccgtttcttttccgatctgacctcaacctccggaggcagcggggtgatgcggcaatcctccgttaatgacatggcctggtcggcgcagttcggcgtgttccgcggcatatcccacatgccggcgggacgtctggaaatttcagcccaccgctctttctccccggatttatcctccccggcaggcttggccctgcggcatccgctagccaccttcctcgcgctgccggaagggggcatggcgcccaacatgctggttgctctgctggatggggccagttacaccaactacatgcttgacggcacgggaagcgcgtttttcccggtaggcgcatcgggcatcacaacgaccatcctggcccccgtcccggccatgagcagggaagcggaggcatgcagccttgagcaggccgccttcatccgcgcttcttatgcgggcggaggcgccgccttttactctctttccacagggcaatgcgaaggctatatctccgcgggcgggtatttgatgaccacatcggaaggagaaaattacctggcgattgttcgcggcgaacaaggcgttatccgtcaaatatggaacacctgggatgggctggcggatgtgctccccctggaaggaggagggtatgccatcagcatttatccgcccgcgcaggtcatggaaccggaggaagaaggagccctgttcaccgttgaagggactccggcgaaaatcttcacagtgacgggagacgaagctttgcaaaccctcgtcatctctgaacgcgacaacacgttgccggccactgtacccgacttcgtgaccaaatggacatggtcgcaagaagcctggagcatggcggaaggaacaggagaagatgccgttgaaacgcggagggaacgtcttcaaccggaagagggttcgcaggaaaaccgctaccgcgtcctcacccgtctgatgaaaaacaatgtagtggcctcctgcacgcttgaggaatatgaaacgaccatcaccggagaacacctgctgagccgcacggaagggtacggcgccgaaggggcgttgactactgtttactcctatgatgactccggccggcttatctcctctgcttctcccaacgcgggggaacacaaaaccgtctacgacgccgcaggacgcccggtgctggaaaacagcccatggggagccaacggattgcggacagtaagcacaaagtaccgtgacagcgccgcaggctacaccagtgaaccggctgaagtaaaaatccagctctctaccgtttccgcagtcaacacgttaagccttgcggtatatacctatgcggaagaaaaccatgtcaaacgcgtggaaaagcgtgaaacggcggcaggctcttccgtcacgcagctcagcgttacggaaacctggctggccggcgcgccgaatgccttcgcggcgggacgcctcaagatggaacaggccgtcaacggcgtacaaactcattatacctacgccccaaccacaaatcatggagccctctacagcgtcacggcggaaacgcgcatcaacggagaacccgttcccggccagtcaacccgccgcgtcagctacatcaccgctgaaggaaacgccgcaagggaagaaaacctcgtcctgctccccacgggcgagtggaggaaaacaggcggcgcttcctactcttacgaccttctcaaccgccgtgtggaaacggtgcgcgacaatggccgcacttcttcccgcgccctgacctgcacaggggaacccctttgggaagttgacgaagacggcgtacgcacggattacgcttataacaccgcccggcagctcattgaaaccacgcgcagcgaaataaacgacgggactgacgtcgtcactccggaaacgatcacggcgtatgaacgcgatgcggcagggcagataataagcgcgacgacccacatcgggccgatgcggacaaccgaggaaactgcctatgacctgctgggccgcgcgacccgcaaaaccgatgtgctgggccgcgtcacaacaaccagttacagcgaagacggactgacggttacgacaaccacgccatcaggggcgacgctcgtcaatacatacaacgcagacgggagcatcgcgcatgaatccggcacagggcaaagggagctctaccacatttatgattttatcagaggcctgtgccacactacccggctggcggacaacacaaccatcctgaaacaggacattcgggacggcttcggacaaaccattacgctgacttctcccaccaccctggaaaacacctatctctatacccgcagcgtttacaatgcgctgggccagctcacccgccgcacggaagggacccgggctccggtggagtatgagtatgacggcatgggaaatccggccagacaaaccgttgtgctcgactcggcgtctccggcggatgcggcaaaaaaccgcatccagactttccagacagcctgggaagaacgtgaagacggcgtctatcaaaacgtcgccgctgcccgcaacaatgcagcgggcaacatgttaagcagcgctgtcaaacggctggttacggaatccgccgttctgcaaaacaggcaaatcaccatcgacgaacgcggccatgaaagcatccggtggaccgaatatgggcagggcgcggtgcgcgtggaaaaaagcagcgtgcccacctccgacgttacagcttccgctaccgtcgtggacggcttcacaacctcagaaacggataatcggggaatcgtcaccgccttcacccgccgttacacggaaaccggcctcgtccggacggtcacggatggcagggggaacgcttccaccactcatacggacattgccggccgcccgattgccgtaactgatgctgccggcaatacgacaaccacgacctattgcgcgaccagcgacaatccctctgccgtcacaaatgccctgggcaatacggccaactatacctacgatgtcaggaaccgtaaaacagcggaatacggcacggccatccagccggccctgttcgcctgggatgacgcagaccgccttatcagcctcaccaccttccgcatagacgaagaaacgatcatttccgacccatccgatctttccggcggagacactaccgtctggacttaccatgacgctaccgggctggaattggaaaaaacttacgccaacggccggggaaccgtccggacctacgatgccaacaaccgccttgccacggaaacggacgcgcgcggcatcgtcactacctatacatggaacgcggcgcaaggccttctcacaggaatcggcttttccgacggcacgccggaacaggccttctcctacaacatcctcggccagctcacgcaagtgacggacgcctcagacatacgtaccttctcttacaatgaatacagcgaccccgtacaggacagcgtcacggtgaatggcgccgttttccctctcgtggaaaccctggacggctacggtcgcagcatcggctacatcctcaaacgcggcgccagcggcaatgcccaaatcgcctcctggggctacgcgccggacgggcgcatcaacagcgcgggcttcatgcacagcggccagaaccgcatctttgaatataactatctggcaggaagcaatctgctggaaaccttgacgatgcccaacggcatgacgctggaacaaagctatgaagccaaacgtgacctgctggcggacatggactataaccgcggaacaaccctcgtctcccgccgcgcctatgcctatgacgccctggggcggccaaccgtccgcaccctcctccgccagggaaccacacgccgcgacgtcttctcctacaacgggagaagcgagcttgcagcggccaccctcggcacggacgcttacgcctatgactatgacaacataggcaaccgcaagacagcgcgggaaatagaggaggaattcgcttacacggccaacggactcaaccagtacacaagtattgagcaatccattcccaactcttccctctccccccgggaacagccttttgtccccacctatgacgctgacggcaaccagacgaaaatcaggaccgctaccggcgtctggacggcggaatacaacgcgctcaaccgtcccgtgcgcttcacccgcacggcggaggacggcacggtgaccaccgtcaccggcgactacgactacatgggacgcaggatcttcaaaaaagtggaaaccaccgtcgccgaccctgaaacgggagaaagcacgacatccgtcatcctgaaccaccgctacctttaccggggccatctgcaaatcgcggccctcgacctcacgcgaacgacgctcaacgccttatggtacatcctgtgggacccgacggaacctgtcgccacacgcccgctggctatccagacggcgggcagctggtttgtctacggctgggacttgaccaaaaacgtgatggaactctacaagagcaacggaaccatcgcgaattcctactcctacgcccccttcggcgaagtcacgcaaaggggcaacatcaccaatcccctccaatggagcagcgaggcatatgatgccgagctggggatggtatattataactttcggttctataatcccgtggatggaaggtggacttcgagagatccgattatagacgaaagaagatggaatgtgtactcatatgtttatcaggcgcctttaagttcctacgatatcattggtcttcaggctcctggatacgaaggtgctttgactgttgctattatcaatcaaatacaggacagagatcgtattgttaactctgctgctcaccaatattgtgataattacaataaatacaaggattctaaatgttgtgatggcgagggaagaatggtatcagacccctatatacccaaagcttgtgacatgtgccacaaatttgttgacaaatattcggaaaatggaaaggtgattaaacctgtcgaatgtgtagcagaatgtctatccgaagcggaagccggaatgcaaaagataggtagatgcaaagatagaaatacgcaaagattaattaatcatgtttcttgctatattaattgtggattttatctgatttcttctaaagcaataggcactccggaaggtggatggaagatgggatttgaagaacttttacctgacctcattgagacaaaaattattgaaccaacaagcaaacaaattgaaaatcaaggaagagaaatacaaaaagctttggactgcaatccatattgttcaaaatatttatgaaaaattaatttgaaatttaatattgaaatgaaccatagatttttaataattggatgtatttctctaatattctggagtttgttagaattagcgatgtttccattttgtggaggagcatttttaatttcgctatcatttatcttatccataattatcatttctgttaattccaaaacaaaaaaacattttttatttacatgttgcattctaacgtgttttttgtgttttggattttttagaccgtcaacggatgcttattatatttcttttatattcgcagtccaatggatcatatcatttatattatcctcttttgctgaatttccgtataatcatgtgaataaaatttctcgattggacattcttgggaatattgtatcctcaattccattcctagttgtattttattggtgcataacgagctaaaaatatttggatgcaattaccgccattataacctccatgatgaaagatggattgggaaagataaaatcagtgagaatctcatagcaaacaattatgtatttataaacaacgaaccaaaatctgatattaatattcttggtttatatagttggggagatttcgggattgaccttttatctgcagcccttgttgtaggagatgttattttaggaggaccaacaggggaaggaatagggcctgccatagctttgcaaggcatgaaaacaggagcaaaaattgcaactaaagaagcagcgaaaaaagttgcagtaaaagatgctaaagaaaaagtaaaaaaacagccgaatgtcttgcgatttatgatggatacaaagctgccgataaaaatgcagcgggatgtaaagcttgcctcaaatgccctgattatttgaaattattggcggctagggcagcggaaattactggctgctcgttatattttaagaaaaaatgtgactatattcttcctgatagtattactaaagggagcgcagcagccgtatccagtcacaaaaatgaattgacaaataagataaaagccttttcaaaatgcgcaaaacatgcggtaaaggcaggatgcaacaacctcccaccactccctcaaatatgacaactattccaactaaaaaagatattaatcctacaccaggaaatcttgacgagttaacagccctgaaacatttccatggaaaaagccagagcgaagccgcaaatcttttttttgaatgtccgacatattatgaagaagatttaaaatggatgggaagtaaagcattcgctttttactttccttctatggaaccgtatcttttgtcggaagcaagtgaagatgattcagatataattaatgcattggcgaatacgctacaaatccgtctgaagcaagatccccaatcaatcaaaggatgtctagttcctgctcttagaattctagattatatatcggaaaatatgcaaaaattcaatgtggatcctactatatacggtaatattactgttaaattgagtaatataatcaatcaaattcgcttactgtaaattccagactgatggcttggttagttcaatctgaatacaatgatgtctttctatgtactaaacaggttatgagtctctattcatcgtcattttaattcgtaattgtttactcttgttttttcatccgagtaatattatgaatatcaaaaaccaaaatattttgagaattttacagcgggactatcccacataatttcgaatttatttaatcatgaaatcaattataatcatatttttatttttttgccttatctcaaaaagaggggcagcagatcaagaatatcaacaaatcgatttatatgcggaaacatcttttcttaaagagaataaaaaacatcgagttaaaaaattaaatttggaacaaaagaaggaattagcgaaaattatcaacaaatacaatttatttcgggatggaaaaacggaaacagacgttccttttatagggaatctgggtatatttcatattataataaataaaaaaccttatttattgttcatggcatataataccaaacacattcatctttttgacaagaaaaaaattggaggtgaagaatatacgaagaagctcttttggttacaagaaagggacaacaagagtggtttagaagttcgagtatttgaattagaaccgctgtatttggaattggaaaagttcttggaaaggatttcatctcctgttatagaaaaagataaataaaaacaataatattcgtttctcaacatgtagaacatgtgattaatattaaaaatgggattgtttactttattgctcatccaagcaatgtgctgaatatcaaaagccagaatcctttgaaaatctgacgccaagactgttctgcatcattccgttattcttttccggcggcaggtctccactccatgcacagccagcgggccatggaggcaatcacccggtcacaagcggattcagaatcctttgaatccctgataaacacggaaaccgccattttccggccgttgggaagaacaatgatgccgacgtcattgcgggcggtaacgccaccccccggcagcgtgaatccggatcccgtcttatgcgccaccacgtaatcccgcggcagctgccctttcaaacgttcagggcctgtagagcaccccgccatgataccccaaagaaaattctgtgtaccccttgccagaattttaccttcgtcaaacgcccggagcagggagttcatggccgacggacggcttgagttgacatattgcaaatcatgattccggtgtatttcttcttccgtaaaacggacattaatgccgtcaattccccattccttcaaatccttctgcacggcctgcggccctccaataaggccaaacaggaggtcgcaggtgttgttgtcgctttcctgaacagtcactctcagcagttccttcagagagaaatcgccgccttgcgggaaacgctcccggagggggctccaggtatctttcaccagttgttccggacgtatgcggatgatctgttccagattcatggcgccctggtccacccgcttcaagacagacaaggccagcacgaatttgacgacgctctgcatgggataggccgcctcatcccccaccatgacggtttcccccgtatccagcatttccgcagccatgcccacacgggccttcagggaatgggccagttcgcgtacggcggaggaatccgctgcggaaacggctggcggagaagacgtggccccctgagaaaaaacgcaaaagaacatgatgcaaccgcatagataaacaccggtggaagtcataggcgccattccataccacgcccgcaacaaccgcaataataatttctcccccttttttcctttcttcgtcatccgcaagccgggcagaaaccttgccacctgtccggcttcctgataagaaggaaagcatgccccatctcctttcggaaaccctcgtctggtgcgtcaccctgctgttattcggcatggggctgatcggcacgctcatccccatgcttcccggaattatcatcattgcggccgggtgcgtctggcagggagccatgggcagagaaaacctggcgtggtgggaatggaccgtcctggcgctgctggtggcgggaggcatggtcattgacaagctttccggaggcatgggcgccaaaaaattcggcagcactgccgccggcatctggggagccatcatcggcgccgtggcggggagcctccttttctcccccatcgtaggccttttgttcatgccgttcctgggggcgctgctggcggaacttatctttgccagaaaggatatcatggacgccttcagggccggttccggagcggcgcttgggatgcttgccggcctgctgctggaatttacctgcggcctgctcatcatcgcctggttctgttcctgctgtttcctgttttaatgtcaaaaaaaactgtaaccgtaccctgcggaagccttcggcaggaacaacggagtttctccgttgctgaaagaaacacagtttccccaacgtattccgcaaaacgccgccccgcatgcccgcccggtcgaatgaccaggttctcccattccctcattttaccagcttatggatgcacctgttccgatacccgtcgccatgatggcaggtttcatgattcttggagccattctttccatggggaaatgttcctttctcatcgcaggctgcaacatgatgaacagagggcagaaaaagcagtatgatgaacaggcgctgtgccggttcatggggaagatcatgtactgcctcgccttcgccatgctgctctggctcgccagcatcattctccagaactccgtgctcctgtccgcctccctgtactttctggtgggaagcattgcatttgcagtcatttacgccggcaccggaagacgatttaaaaaatagcgttttttacaccagctttcttttacttttattatacgcaacattatcttctcccatgaacgtccctgcaaccttgaaacattccttcctgctctgccttttcgcggcagccgtcccactccgggccattccggcccccatgcaggtcaccgccgccacccccgcccgggtatggacggaaggatacggcacgggcaacggaaggctgggcatcctctctttcggcgtttttccgaaggaaaccgtcgtcctcaatgaaggaagtattttcgcaaagaaaaatttccaaatgagggaaggcgccgcggaagctctggacaaggcgcgcgaactttgcaaggaaggaaaataccgcagtgcggatcagctattccgtaagaatatccttccccccggcaacattgcgggggattaccagcagggggggcgtcttcaggtggaattccaggggcttccctcaccttcctcctatcagcgtacgctggatatgcggcggggcaaggcaaccacccgcgcccaattcggcacgggggaattgaccacagaaatcctggcggccccgtccagcgactgcgccgcctaccacattgcctgcacaatgccgtccggatgccgcgtttccctgaatctggaacacccggatccggcttcccgaattgttgcgcagccgaatggctgggcgctggaaggacagggaagcaacggaggcacccggtttgaaaatacggtggccattctggctcccggagcctccattactcgcaaaggctcaacaattattcttgattccgcccgggaagtgctggtgctttcatccatttccacagattacaatatccggaagccggaaactcccctgacgcattccctgacggctaaaaacgcgcgaatcctggcaaaagcgcaaaaggcgggatggaaaaaactggcggcggaaacggaagattatttttcccggctcatgacgcgctgccaggtggatctgggagattccccggccggggtctccgccatgaccaccgcccaaaggctggagcgggtcaaacagggaaagaaggatccggatcttctggaacagcttttccagttcggccgcttctgcacgattgtccacaccaggccggggcagcttccctgcggtttacaggggttatggaatccggagttgagggcggcgtggatgggctgttatttcctgaacatcaacagccagatgaaccagtggccctcccatgtcaccgggctgggagaattccagaactcctatcttgattttgtccgcagcctgcgcccccacggagagaaattcgcgcgcttcatcaagagggacggcttctgcttcggccactatacggattgctggaaacgcacctatttttcaggcaacaatccggaatggggggccagcctcatgaacggggcgtgggcgtgcgcccacctggtggacagctaccgcttcaccggagacagggaagaccttaaaaaatcgctgcccattctggaatccaacgcgcgattcatcatgtcctggtttgaggatgacggcgagggccgttacctttccggcccgggggtgtctccggagaccggattttacgcgccggacggaacaggccccaacgtgctttcctatgtttccaacggcgcttcccatgaccagcttctgggcagggaatccctccgcaattacatttacgcctgcggggagctgggcgtacaaacgcctactctgcttaaagccgtccaatttctcaggaaaattccccagccagccatcggccccgacggaagggtgcaggaatggaagcagccttttgaagaaatgcagaagggccaccggcacatcagccacctttacggcttgtttcccggcacggaatgggacattctcaatacgccggaatacgcagaggctgtgcgcaagtcagccgatttccggcgcaagtacgcggatatgggaaacaatggcatcaggaccggatggagcacggcgtggctcatcaatctttacgccgcccttggcgacggaaacgccgcagaggacaggatgtacaccatgctgaggcactacatcaactccaacctttttgacatccatcccccgttccagatagacggaaatttcggcttttcctccggcgtggccgaatgcctgatccaaagccggatcatgcaggacgggttccaggttatcctgctggctccggctctggcagacggctggaagaagggttccgccacgggattgcgtacgcggggcgggcttaaggtggacttgtcctggcaaaacggccgggtgcaggccacagctaccgctacgcgtccgggcaaattccggttcatgcatcaaggcaggaaaaaggatttgtccatgaataagggagaaacggcgcgtcttgattttcctccgctttcccattaggattcccctctctgcgttacctcttcaatttccgccatgcatttcttttccatgaccttcaggctcggtctgctcatggcggtggtctgcatcgccctcagctcctgttccaagcttttttctccccgcggaatcggaaaaataccggacacggaccaaacggaaacgctcctgaaagcgcatgtattccacctggcggattccatcggtgaacggaacgtctaccaccccggctccatggagcgttccgcccgctacattgaacaaaaactggagggaatgggttatgccgtcacgcgccaggctgtccgtatcccaccctccggaaaattcggctccgtcaaggactggacggcatataatctcatcgccatcaagaaagggacctccccccggcccaaaatgctcatcgtcggcgcgcattacgataccaaagtgggcatggacaactggcacgaccacggtcctgcccggccttcccgcaccggaacgccgggagccaatgacaacgcttccggcgtagccgccctgctggaaacggcacgtgcccttgcagcaacttccacccttcacgatgtttgcctggtggcctacgccaatgaagaaccccctttttaccagacgcccgccatgggcagcgcagtgcatgccaaatccgtctctcatcatccgggcaggaaaaaaatcatcggcatgattgccctggaaacgctgggttgctattccccccgggtgaataaaaaacgccaatccgccgtagttgccggattggccggcctgccggaccgctgcgactatgttgccttcctctccaccaacacgggccacaaactggcacgctcctgcgcggaggaattttccgccttgagccgttttccggtgcgttccgccgtgttcccgtattacacccgcggcgtttcctggtctgacgactggggatacatgaaggagggcatcccctcctttgccgccacggatacggccttcctccgctgcgacgattaccatgaaaccagcgatacggctgaaaaactggactatccccagtttgcagaagtggtgcagggcctttccaaactcgtcatttcactggccaacaaaccatgaacaaaaaacagatattattctccgcgctttttctgacattcgcctgcgcttcagccggggccgctccgcctgaaccgtccgcgctggaggccatctgcccgccctcagagggaaaagcctttcactccggatggatttccctgggactgaaagcggcggatctgaaagaaaaacaagtctccgccggacacattacggatgtgggggaagcgcaggttctgcttcacttccccgccggatggaggccgcaagacaggcgcacggccctgtgtatctttccgggaggggggtattccatccaggccattgaaaaggaaggcagccgcattgccggctgggcggcggaacacggcatggtgggggttgtcgtgaaataccgcgtttcaggaaccagcaatgccttggggaagtttcccggtcccctgttggacgcccgccaggccctgaggaccgtgcgggaaaacgcctcctccctgggaattgaccctctccgcatcggcgtcatgggcttttccgcaggcggccatctggcggccatgacctctacgctgtggaaccgcaccctgccggaagaagcggaaaatccgctgaaaaacatttccgcccgtccggatttctccatgctcatctatcccgtcattaccatggcgccccatacaacccacgggggaacgcgcaacaaaatattgggcccccatccctccccggccctggaggagatgtgttccgcggagcggcaagtgacgaaacagacgcccccggtcttcctcgtccacgctctggatgacggcgtttcctgcgccaacagcaggttgatggaacaggcctgccggaataagggggttcccgtcagccttaatctctatccaacgggaggccacgggtatggcatggaaaaacgcgggcatcccacggatcaatggccggatgccgccgaacaatggctcagggaacagggggttcttccttccccggcttctgcccgcgggggtgctccttccggcgccgtcccctcctccggaacacggcgggaatgaatgcgctaggacccaagtgtgccgcaccgcagggttgaccggaaccgggtccagtggtactttttccgggcatgagtgcgcccgaaaagaattataaagacaccatcctgttaccggaaaccggcttccccatgagaggggatctgacgaaaaacgaacccgtacgcctgaaaaagtgggaagacaccgggctgtacgaacgcattttgtcccgcaggatggcccagggcgcaccccggttcctccttcatgacggcccccccttcgccaacggggatgtgcacatgggcaccgccctgaacaaaattctcaaggacctggtcctgaaatcaaaaaccatggccggttatgctgccccttatattccgggctgggactgccacggccttcccattgaattcaaggtggttcagaaggcccgtgacctggatgcggcggaaatccgccggcgctgtgcggaattcgccaaaggattcattgacattcagcgcacttccttccgccgcctgggcgtgttcggcgattgggagaatccctacctgaccatgaagccggcgtatgaggccaacatcctgcgcgtgttcgccaaactggtggaagacggagcggtgtaccagagccgcaaacccgtccagtggtcctatggggcctatacggcgctggcggaagcggaaatagactacaaggaaaaggtcagtacctccgttttcgtgcgcttcccgcttctggacaatcccctgggactgaaagcctccatggtcatctggaccactactccgtggacgctgcccgccaacgtaggtctcgccctccatccgcgtttcacctacgtggcaggcaggttcatgaagaacggccagacggaaaacctcgtcatcgtcaaagagctgctggatgccttcgctcagaaaacgggctgggctcttgcggaaaccatccgtgaattcaagggagccgaactggaaaactgcgaagcccggcatcccttcctttcccgcacgtcaacaatcatcctggcggatttcgtcaccacggacaccggaaccggcatcgtccacatcgcgcccggccacggcgcggacgactataacgtaggacgccaatacggactgcccgtcctctcccccgtggacgacgacggcaaatacacggaggaagtgggcgtaccctccctggtgggcaaacatgtctttgacgccaacaaggacatcatttccatgctggaacagggcaacaacctcttcggcgtggaagaataccgccaccagtacccgcactgctggcgttccaagacgcctattattttccgggccgtggaacagttcttcatctccatggacaagctccgcccgcaggccctggaagaaatagacaaggtgcagtggctgccctcctggggccgcaaccgcatttacggcacggtggaagccaggccggactggtgcatctcccgccagcgcacctggggcgtgcctctgcccgtcttctttgacgaaaacggcaaagccgtcctggacgccgctctggttcgcaaaatcgcggatatggtggagaaacacggttccaacatctggtttgaactctccgatgaagacctgtgcgaacgcctcggcctgccgaagacctggaaaaagggcaaggatacgctggacgtctggattgattccggcagttcccatatggccgtcatggacaaccgccccgggctggacgcgccggcggacctttacctggaagctacggaccaacaccgaggctggttccagagttccctgatgctttccgtcgcctggcgcggcaaggctccgtacaaggccgtgatgacccacggcttcgtcgtggacaaagacaccgggaaaaaaacctccaaatctgacgccaagagcggcaaacccattgacgcggcctattactacgacaaatacggcgcagacatcgtgcgcctgtgggccgcctccgtggactggcaaaatgaagtccccttcggggaagacctcttcaagcaggtgacggaaccctaccgccgcctccgcaacaccctgcgcatcctgctgggcaacatcagcggattcgatttcgccgcgcaggcagtcgccccggaacacatgcccctcctggaccgctggattctggaacgcctgaacgccgtcatcagggaaacgctgaaggcctatgaagcctatgacttccgcaaggcgttcagcgccatcaaccagttctgcaccagcgacctgtccgccctgtacgtggacaccaccaaggaccgcctgtactgcgactcatcttcctccgtgcgccgccgcgccacacaaacggccatgaccatcatcttcaaggctctgtgccgtctgctggctcccatcctggccttcacggcggatgaagcctgggaatacgcgggatataaaggcagcgtgcatgagcaggacttccccgcccccatgccggaatatgatacccaggaggcgacctccgtcatttcccgtctccaggaaatcaagtccgtcattcaggtagccattgaagaacaggtgaaagccaaggtgttttccaaaaataatgaggcatccattaccctgaccgttcccgtgaatgagagcgaagacgtcgtggcgcttctggaagaccgggcgtttgccacggaattcttcatcatcgcggaccttgacgtgaaaaccggtccggaactggcagcctccgccgcaaaaacggaacatgccatgtgcccgcgctgccgccggtatgaaccggcggcggaaggcggggacgtatgcgaacgctgcgcggaagttctttcctgaaccgcatccactccattttccgacctttatatggacccccagacggaaaaagaacccgccccccataaaaagacgccccccggctggctctggtggagcttgctgggcgcagggctgtatgcgctggaccaggccagcaagctgtggattatccgccgcttcccgctgaactacctgaacgaaaagctccataagtacgcctatctgccggactttccgggcttccagcacatcaatgcggacggcacgctggacttcgccacgaacggacgcatgccggaggcggaactggcgcggctcccggacctgaatccaaacacggtggacgccctgaacaaactgagggaactggaacccatttccttcctggacggaaccatgaacattacccgcgtgcacaacacgggcgttgctttcgggctggggaacggcaccgtctggtccagctatcttttcctggcagttcccgtgctcgccatcgtggtcctggtcgtgctttaccggaaaaacttcttccacacggcatggctcaagctggcctatgtcctgctgctggcgggcgtagccggcaacctgacggaccgcctgattcagggcttcctgattccgtatgagcagcagcacggtttcttcaccaagctgatgaacggttacgtggtggacttcattgacgtcaccatccccctcttcaactaccgctggcccgccttcaatgtggcggactcctgcatcttcgtagcggcaattattttcttcatcgccagcattttctccgccaggaataaagaagaaaaaacatcctgaaacgcccatgaccacccggctcgttactctgtcaggactgcttttgtgcgggagcctcgcctccggcaaaaatgaattgtccttcaaggaaacggtggttccggtaaaggtggctccggaccaggacagcatcacggcatccttctccttcaccaacacttccggcaccccggtcaccatcagtaaaatccacgtttcctgcgactgcaccaccgccggagcgaaggataacaagctgacgtatgccccgggggaatccggcgtcatcagcgccgtaatgaaaaccggcaacttttccggcaccgtggacaaggacatgacggtgtacgccaacggctccgcctacaagctggtcatacgcgcgcagatcccggacatcatccggatggaaccccgcaagctggaatgggccagaggagaggccgccgcgcccaaaaccataaaaatcaccatctccaaagaactgcccgtcaacctgaccacggtggatttgacgggagacgcctttgactacgagcctgtgaccgtgaaaaaaggcagggaatataaaatcatcgtcactcccaaatccacggccaagccggccttcaacaccatctgggtgcgcacggattccgccgtgccgcgctacaaacgccaaatggggttcctggccatcaaggaaaactgacatccgcccttccttccatgagagacgccttttcctccgctctgaaactcctgctggccgtatttctgctggccgtaggcgtcgccgcgctggatctgcgcgtcatccagccgttccgcacgccgccctgcaacccggaaactctggaggaagggcacgtgtgcctctcccaggtattaaaggaatggccgggaaaaatcctctggatagatgccagaaagcaggacgactttgaacgccataccgtcacccgggcccccgtttaccccatccgcccggcggatgccaattaccaggaactcctggcgaatgccatggaagccctgatgacggcagaggacaggggattctgcatcgtcatcttttgcagcagggactgcacctccagcgcggccgtggccaatgaactgaaaaagccggaatacggcatccgcgcgcccattttcattctggaaggaggctgggatgaattgcgcaaagaaccctcactagtaccatagccatgcttgacacagcaaccattcgcccgcagttccccattctggaaaccagcgtgcacggcaagcctctcatttacctggataatgcggccactacgcaaaaacccctggccgtgctggacgccatccgccattactacgatacggaaaacgccaatgtgcaccgcggctcccactacctgagccagctcgcgacggaagcgcatgaagaatcgcgggaaacggtggcgcggttcatcaacgcgccggaaacggcggaagtcctgttcacttccggctgcacgatgggcatcaacctggcggcggataccatcgccgcgtccggcatggtcaaaccgggagacgaagtcatcgtaaccgcttccgaacaccattccaatatcgttccctggcaaatgctgtgcgaacgcacgggcgccgtcctgaaagcggttcccctgacgccgggccagactctggacatggaagcttaccggaacatgctttccccacgcacccgcatcgtagccgtgggacacgtttccaatacgctgggaacggttaatcccgtgagggaaatggccgcgctcgccaaggagaacaggcaggaaaccatcgtgctgattgacggagcccaggctgtttcccacatgaatgtggacgttcaggaactgggctgcgacctgtacgccttttccggccacaagctgtacgcgcccaccggcatcggcgcgctgtggggaaaaagggagctgctggagaaactgccgccgtggatgggcggtggggaaatgatcaaggaagtcacctttgaaaaaaccgtttacaacgacatccctttcaaatatgaagcgggaacgcccaacattggcggggcagtgggtctggcggccgccatccgctacgtctccgggctgggcctggacaacattgccgcccatgaacagaaactgacggatatggcggtggaaggcctgaaggccatgccgcgcctgaccgtactggccccggacgtgccgcacagcgccgtggtctccgtcctggcggagggcatccaccactatgacctgggtacgttgctggaccagatggggattgccgtaagaaccgggcaccattgctgccagccgctcatgtgcgccctgggcaccaccgggactacccgcgcctcctttgccctgtacaatacggaagaggaagtgcagaccttcctcaaatccatgaaccgggcgctggacatgctctcctgaataaccctcccttccctgcttatttacaccgcgcatcatgaaaacggtttccatccttctcttaggactggccataagcctttccggctgttccctgcaccagcggcaggaaatggagtacgcccattaccagaatgacgccgcggctatccgggaggcccatgccgcatggctcattctttcctctcccaaccgcagccgggaatggccggaagcccggaaaaaatacaatgcgtgcattcgggagctggcctcccacctgaaggaagccaaacgcaaagggggcatgaatgaggagaagcgcctgagccttcccttcgtcattgaaaaatctccctatgccagggacagcaatccgtggttctatgaggccattttcatgtccgatgaagtggaccccaccttccgcctgcgcgaaagcgtgacggtagagggaatgggcataccgctgacggggctggcgccccggggcggttcccgcccccatgccaacgtgcttaaggacaacggcaacgtgcacacgctgacggccattctggactttgaccgcatggtggacgggaaaccaaccctccgcaccattccgcgcctgatgaatgagcacatcttcattggcaaaaacaaggtgcggcagcctctggcagccaatttttccgtccccatcgctctcttctggaagctttccgacgcagacggaacggaactgctgggggcattccgccccaaaaaggccatcaatacgatggggctttatttttccgaaccctatgacccccggaaaatacccgtggttttcacccacggcctgatgtccggccccgccaccttcgctaacctgaccaaccgtctcctggtggatccggtcatccgggaaaactaccaattctggttcttcggctatccgtccgggctggcctggaccattccggccagcaggcagcggcaggccctgaaggagctcatgcaggaatacaatccccgcggaacatccagggaaatgaacaacatcgtcatggtgggacactccatgggcggcctcatcacccgcttcaataactccaccaaaccctggacgctgatgaagggagtatttgagctttctccggaaacgtttgagggaatgacgctggaaaactggaagaaaggaatggcccccctccattatgatgaacaaacgcttgaacggctccagaataatttcatcttttccccgccccagggagtcacgcgcatcgtgtacatggccaccccgcaccgcggttccactttcgcggacaactggataggaagactgggccagcgcctgatcgacctcccctcggacatgctggaagaagtcacccgcatcgccactctcagccgcggcatgttcctcctcaaccccctgcaactgaaggacgagctgaccagcatccgccagctttccccgaattcatccctggtcaaatacatgtcggagctgcgcggctccccaaatgttcccgttcattccatcattggagacaggggcaggaacgacacgcccaattcctccgacggagtggtcaagtaccactcatcccacctggactggagcgccagtgaaaaaatcgttccgtccgggcacagcgtgcaggatgacccggcctccgccgtggaactgcggcgcatcctccgggaacacctggtcaaggtcaaaggccgtaaaacgctcgaagaagcggacgcgaaagccgccactcccgtatggcaggccaatccctcgccgcctatcatcctgaaaaggccctgatgcaggggactgattctccttgtccatgcaaggcctccttcccttccccccttctgctgttcctgctgataacagcagccatcttccagtcaaacggccacgcctcggcgatcctgtttccgggttcctgtatgtcccggctttaacggttggaacgccctcgttcatccaccctccctgccgctcccggaaaaaaacaggaaccgaacaggatttaccttgccgcgggcatctgcggcaacatgccgccgcggcggttgaaacaactgaaattttccccgctcattacggcctgttcctggctgccctgatttgactggccggttacggaaaaaggcgcgctccatccgggcatgattggcgtccgttcagcatcagggcgtcccgccatcaaaatatgcccgcttatagagttgcttccgtaggggaatttaaggtagagtgggaatcaatactattccacctcccttttccatgtctgccgacgattcctttcccatggaccagatttcctctctctttccccaattggaaaatattcagcttgtcggagccaaaggcccccagcaaattttcacagctaccctgaaatccaactttgctcccgtcatgctgcgggtggttcccacggaagaagccggcatcttcggctgggatcctgaattcatcgtccgctccctcaccatcgtggaacaatcccaccaggggctcctgcgcgtttatgaagtaggacaggcggggccgtttactttcatcatctccgaacaccccccctatccgcggatggcggatatggaaaaccttccccaaatatctccccaggcggcgctcaacctggtgcgcaacatggcggaaggactgctgacgctgcaccggaaaaacatttttcacgggggcatcacgcccaagctgatttgcctgcgcgaagacggcggagacgccctgctgctgcccatcaatatttatcctgcccaacctccggtggacatgggggacttcgcctctccggagtgggtcaccggagcggaaaccacgttcacgccgggcatggatatttacgcactggggctggcgctctacattctgcttacccgcaaaacgccgatggaagcgggcttcgccatgccctcctcactaatcaaatgcagcgatgccgtggattcggcagtctcccgcgccatcaatccggatacccgggaacgctaccgggacctgggggatttcatcacggatctggataaagccattgccaatccttcgggaagaaatgcggcctccattcctccaccgtcatcttccccggccattccggccctgaacatgcaaaaagggcagtccaacatctattactatctcattccggccctgatcgtgggcattgtgctgacctatacctgcatcctgtataagaaggatgtcgttagaatgcgcaatgattataatgaacaggtgcaaaaggaaaataacgcgaaagcggaagcggcaagacaagcgaacagggacgcgcgccgccacgctccggccaccgcgcaaaacgccgctgcggccattccttcacctgttccggccgcgcgtccggcgcagacgccggcagttcccaaagtttccgcggaacccggcaaaatcaattggagccttcagcccggcgtcaaggttcgccagagttccaaccgcaacatgctgggagcttatggtccgaaaaaggccgttgacggcaataccagctccaggatttccgacgtttcaatcagcgccacaggcgtggttgaagggaaaaccgcctggttcggcattgacttcggcagggagaccaaccgcaccatagaaaaggtagtcatttacacgccggccaacctgacgctgctgggcactatggaaaaattcaaggtaatcctctacggcaatgacaaaaacgtgctggcggaaaaaaccttcagcaccactccttcggaaaaatccaccaacgtcacttcctggaaactggacgctccagtcaaggcgcgcgccttgcgcgtggaatccgcaaatccctcccagcccctggcgttgacggaagtggaagcgtacggaccggaagatgcggaggacacaccggttcccgcacctgcggagtaataattatccgcgcagccctgcacccgctcgccccccctccgggggccatgctgaaaaccccgtttcctttccccctcccggaaatcaggttggggcagggcctgatggaatgtcacgcgctaagttccgggtttggattcgcgtatgaaattttccggtttctgctccattctccggaagccatccaggcccggacggaggaaaatccgaaaaacgtatttgctccggaccggaaacagccgcccctctccaccttccccaccccggaaaaacgctctcatccccatatggctcccggagaaatatcttgaagtggctgttgttcctgtggacctctttcccattcaggaaaaacaatactccggaaataaaaaacccggcgccgcctcacggcgggccgggccagcaaaatagcaattcttccgattaccggttggcagacttcacaatcatggcatccttgccgatgcggccgcgcagatagtgaagtttggcgcggcggactttgccgcggttcacgacttcaatcttggcaatgcggggagtatgcagggggaatacgcgttccacgccttcaccgtaggaaattttgcggacggtgaaagcttcattgatgccggaaccgcgcttggcgatcacaatgccctggaaaatctggatacgttccttgccgccttcaataacacgagtgtgaaccttgatggtatcacctacgttaaatggggtcacatccgccttgagttgctcttgctcgattttgttgataatgttcatcttgtgttatctattgctggtgaatatcagtaaaaggaaaacttacgggacgcagaatatgagccataatcccctaaaaggcaatccaaatttgccgtacgtccttaatttattttttcggcggggccggcggcggagccaccctggcaagccattcctccagcgccggaagaaaagcggaggaagacatgaggccccggatgccgtccgcccgctgcagaaaagccttgttaccgccccgggcccgttccgccatcaggatttccagcaacaggcgcgcgcgggtgcgggcgtcagccgcgccgtccagagcggaggaaaggagctctccggcgcgggccggttccttccggtacaggcattccagcgccagagcttcataaaggcaggaaaaagaggccttccgggcggactccatcaaacgcgcggaacgctccttccagcggtctccgaactgcacggaggaagcccaccacccctggaaataacggtcttcttccgtcggctccacgtccatatccttcatgcgggcgtatggacggtacagggggtctccgaacaccaccccctgccaggacagcacaggcatgctcatccaggaagcctccgccacggtatagccgtccaggaggcggtccacaaaaatatcaaagcggtggcaggcgcccaggaacggctcatacacgtttcccaccgtcacagcagcccccttctccagcagggcggaactccaccccctgccggggaccttgaaatcggcggcgctgaaggaatgcagatgcatggctatcgccccgggccggaagcggaacgaaggatccgaaaacggtccgttcgcattccccgcataccacccgcagtaaagagccgtatcccggctcaaggggaatttttccggcagggtctggggccagtcatccagataagcgggaatgcccgcctccctcacgcgctcgaacacgtcgtccatccaccggtccccctgggcataggggccgccccggtccacaacggcccacccccataaaccttttttctccacgttcgccggttccgtcaccagccgcatgcaggtatcgggcgtcagtccgtccaggcggcataccagaaacgaaggaaggccggaacccacaaaatcctcccttttattaaaatagggattcacctgccaggacttcctttcataaccgcccaccgccagcagagccagttcggaatccaccgcagcgcgatccgtctgcatctggttgacgcctttcccgggaaggggagcgggcgtttcatgccgtatcttcatcggcaggtccgccatcagcgccagcacaaaaatcttccggttcatcaagggggaggacgcaatgccggaaggcacccaccaccgttgtttccgcgccgtctccagcagcgggacgcggatcgtctcctcatactccttccgcgaaatctcgccggtcatggggcaatccagggaaacgagattcccttccggaacgccgcgcacccgcgcatattccctggccatgcggcggctcagctcggattttccgttataaaccacggccacatgagcgggcagcagctcataggcacacgcggcggaaaaccatgacgccagcagaaataacacggctaatccactcttgaacatgcccctaccatacctcatcttccggggcaatcaagcaggtgaaaaggccggccgcgaattcgccatttttccgcttttcgcttcacatcttaaaaaaatccgctttaataactcttgatgtattgcaggcctcccccctgcattcccctataaccatcacacgcatatgattcagcaaattgaccatatcggcatcgccgtcaagagtcttgacgccaccgttccctattaccgcgatgcgctcgggctcggcgagccccacattgaggaagtccccactcaaaaggtccgcgtcgccatgtttgacgttgccggcgtccacatcgaactgctcgaacccacctctccggaaagcgccatcgccaaggctattgagaaaaaaggggaaggcatccaccacatcgctttcaagaccaatgacatcgccggaaatatctcccaggccaaggaagcgggccttaccgtgctgaacgacccgcccgtccccggcgcccacaacacgcaggtcaccttcctgcatcccaaatgcaccttcggcgtcctgaccgaattctgccagcaccccggcggctgcgaatgcggcaagtaacattctccctattcaccataccactataccaatggctattgatcccaaattgattgacgatctgaacagccgccgcaagaaggtaatcctcagcggcggtcaggaaaagatcgacaagagacatgaaaagggcgaaatgacagcccgcgaccgcatggggtacctctttgaggaaggcaccttctcggaaatcggcatgcatgtgcgccacaactgccacaacttcggcatgggcaagaaggaaatccccggcgacggcgtcgtttccggcttcggcctggtggacggccgtccggtggcctgcgcggcctccgacttcctggcccagggcgggtccctcggctacatgcacgccatgaaaattgcggatgcccagaagtacgccctgaaagccggcatcccgatggtgaccgtgaacgactccggcggcgcgcgcctccaggaaggcgtggcggccctttccggctatgcccaggtgttctacaacaatgtgcttgcctccggcgtggttccgcaaatctccatgattctgggtccctgcgcgggcggcgcggcctactcccccgccctgacggacttcatcatcatgcgcaattccggcaacgccggcatgtacatcaccggccccaaggtgattgaacaggtcacgtatgaaaaatgcacgatggatgacatcggctccgccgccattcacgccaccgtatccggcaacgtccatttcgtagcggacagcgacgcgcacgccatggacatcctgaagaggctgctttccttccttccttccaacaacacggaagaaccgccccacaaactggacaccccgcttgacctgagcgcagacgaaggcatgagcgacctgattcccggcgacaaccgcacgccgctggacgtccagcccatcatcagccgcctggtggacaacggggacttcctggaagtgcataaggacttcgccaaaaacgtcgtcgtcggcttcggccgcatctgcggcgtagtagtcggcatcatcgccaaccagcccaacgtgaaagccggctgcctggatatcgactcctccgacaaggccgcgcgcttcatccgcttctgcaacgcgttcaatattccgttggtgaacctggtggacgtgcccggcttcctgcccggcaagaaccaggaacggggcggcattatccgccacggcgccaaactcatcttcgcctattcccaggccacggtgcccaaagtcaccctgatcatgcggaaagcctacggcggcgcctacatcgccatgtgctgcaaggacctgggcgctgacgccgtcttcgcctggcccggcgcggaaatcgccgtcatgggcgcggaaggcgccgttccggtactctacggccgtgaattgaaggctgtggaagacccggcggaaaaagccaagcgacagggagaactccttgaagaataccgggaagccttctacaacccgtatgtggcggccggcatggggcagatcacggaagtcatcaatccggaagaaacccgcgccaaaatcgccttcgtcctgcgcaccctgctgaacaagaaggaagtgcgcccggccaagaaacacggcaacattccgctctaacatccatctcaacggatcatatgttactcacaacactcgcctttgcacagggcatcgccaacgtcatgaacaatctgaactatcagattgtcggcattatggtggtcatgatgtgcctgggtggcctggccgtcattctgaccatcagcggctccatcgccgccgccattcagaacagggccaaatccaaaaccgccgctcccgtggccgcgcctgccgccgcccccgctgcggcgggcaaaccgggcatgactccggaaatgctcgccatcctctccgcagcggtggactccgccatgacggagctcacgccggaaatggtggccgtcatctccgccgccgtggacgcgggcctggacggcatgagccaccgcattgtggaaatcaagcaatccccgggctccggctatgcggccgcaggcagggcggaaatcttcgcctcccaccgcattcggccttcccgttgaactacagcattattcacccttacccccgccccggcgggaaccatttaacttaatactccataccatacattatcatgaagaaacttcgcatcaccgtagacggcaaggtatttgacgtatccgtagaactcctggaccaggtatcctccactaccgcagccccggcccccgcacctgtggccgctcccgctcctgccgcatccgcacccgtggccgccccgtctccggctccggctcccgcacctgcgcccgctccggccgccgccggcgccggagacgtgcccagcccgcttgccggcaaggttgtttccctggacgtggccgctggcgcctccgtgaaggccggcgaccagattctgacgctggaagccatgaagatgaataccatcatctacgctcccgcctccggcacgctcaccgctttctgcgtaaacccgggtgatacggttcaggaaggacaggctctggccaaaattggttaatcccggcggcaaccgcccggaatctccaacagttcctggctccgactcagataacaaaccgctacaataacattccgtatgagtctttttgattcattaatcacctttttacaggggatgggcatcttctccctatcatggcaaatggtagggatgtggggcattgccatcctgctcctgtatctgggtgtagccaagcaatacgaacctctcctgatggttcccattgctttcggcgccctcatcgccaacattccggacaacggaatgctcatcacccagctgaaccagcaggtcatctcctccaatgaacagggggaagtaacctccacgtccctgaacaacgtgggctacctgcgcgttcatgtggctcctctgcagcagacgcccgccaaggtgccggccaatctgaccacgccggaagcccgcgcccagtatctggaaaccatgcagcagcccatgcaggtttatcccggcagccagctgaccgtttccaaaatcaagtccgtgcgggaatcccaggaaaaagccaaagctgacgccgcccgcctgggagacgacagtctgacagtggatcccaacctgaaggacttccagaacgtgacggaggacaacggcaatgagccggtcttcctactcacgaacggagaaggaaccaccgtcgtccgccagcagggcgtcaattactttgacaccagcggcaaccgtgttcccgtggacctgaaaacgcagaagctggaacccctggtggtttccgccgcaggcaaatacgtggccgtaggccaacatacccaggaactgctggtcacctccatccacgggggcctgtatgactggatcgggctgggcatcaaggctgaaattttcccgcccatcatcttcctgggcgtaggagccctgacggacttcggcccgctgctcgccgcaccgcgcaccctgcttctgggcgcggcggcccaggtgggcgtagccgccacgttcttcatggccctgttcatgggcttcaacccgaatgaagccgcctccatcggcatcatcggcggagctgacggccccacttccatcttcctgacgatgaagctggctccgcacctgctgggcgccgtggccgtggccgcatacacgtacatgtccctggttccgctgatacagccgcccatcatggcgttgctgacgaccaagaaggagcgcctcatccgcatgaaatccctgcggacggtcagcaagagcgaaaaactgttcttcgccgtgctggtaaccattgtcaccattctgctgattccggacgcatccccgctcatcggcatgctgatgctcggcaacttcctgcgcgaatgcaaggtgacggaacgcctggttcaggcctcccagaatgaaatcatcaacatcgtcaccatcttcctgggaacctccgtgggtctcacgatgcagggagaccgcttcctgcaggcggaaacgctgctaatcattctgctgggcattgtcgccttcggcgtagccactgcgggcggcgtcatcgccgccaagctcatgaacctcatctggcgcaagaatccggtcaaccccctcatcgggtccgcaggcgtctccgccgtcccgatggcggcccgcgtctcccacaatgtgggccagaagtacgacccctccaactatctgctcatgcacgccatgggcccgaacgttgcaggcgtgatcggcaccgcagtcatcgcgggctactacatcgccactctggcgaaataaccagaattgaaaattactcccggcctcggcccgtcccatgaattccgcagcctcattttccacccctccggaggaggaaggaccatgcggcgactggacttatcatgaatgggccgaggctttttccaccaatgacctggcccgctccctgcccccggggcatattgccgtctgccgcgttcagacaggaggccgcggcaggttcaaccgcaaatggataggggaggaaggcggcctgtgggcatccttcaccgttcccctgtccgctcctgcggatacagcggccggcgtgcactggggccatttgcccctggttgcggggctggccctgttcaacatgctccgcggcatggggctggattccgtgcgcctgcgctggccgaacgacctgctggcgggcaaatccaaactggcgggaatactggtggaacgcccggcggaaaacatggccgtcatcggcatcggcatcaatgttttcaatgatgtagcctccatcgccggggaaatcaaggaccctccggcaaggctggcggatcttgttcgggactgcccttccctgcacgccgtcatggcttccctgggcagtcatttgaaccaggttctttccgtcttttcccacggcggcgtctctgcccttcaggagggtctgtcccgggcatgggccggagaaaggccggtttccattcttacggatgacgaaaccgtccggggtatttttacagggattgacgatcagggcaatcctgtgctatcccttccggccggcgccgtccgcaccattccggcgcacctgattaacaggctcctcgaagaatgagcctgccgctccgtttttacacggggtttctttcttttttcatccaacaaaaatcactgacatgagttacaaggtactgacaccagaagaagcagcaagcctgatcaagcatggccaccatattgggctgagcggattcacgcccgccggaacggccaaggccgttacggccgcgctggcaaaaatcgcagaagcggaacatgagaaggggaaccctttccaggtgagcgtcttcaccggtgcttccaccggcgattcctgcgacgggatcctttcccgggccaaggcaatccgctaccgcgctccctacaccaccaacgttgatttccgcaaggcggtgaacaacggggaaatcgcctataatgacatccatttgtcccagatggcccaggaagtgcgctacgggttcatgggcaacgtggacatcgccattattgaagcctgtgaagtcacggctgacggcaaaatttacctgacggccgcgggcgggatcgctcccaccatctgccgcctggcagacaaaattatcgtggaattaaacgccgcccacagcaagagcgccatgggcctgcacgacgtttacgaacccctggatcctccctaccgccgcgaaatctccatcttcaaacccagcgaccgcatcggcaagccgtacatccaggttgacccgaaaaagattgtgggcgttgtggaaaccaactggccggatgaagcccgttccttcgccgcagcggatcccctgactgataaaatcgggcagaacgtggccgatttcctggctgccgacatgaaacggggcatcattccctccacattcctgcctctccagtccggcgtaggcaacatcgcaaacgcggtgctgggcgccctgggccgcgacaagacgattcccgcgttcgagatgtacacggaagtcatccagaactccgtcatcggcctgattcgggaaggccgcgtgaaattcggcagcgcctgctccctgaccgtgacgaacgactgcctggaaggcatttacagggatatggactttttccgcgacaaactggtgctccgtccctcggaaatatccaacagcccggaagttatccgccgtctcggcgtcatctccatcaacaccgccattgaagccgacatttacgggaacgtcaactccacgcacattggcggcacgaagatgatgaacggcatcggcgggtccggcgacttcacgcgcaacgcctacatctccattttcacctgcccgtccgttgccaaggacggcaagatcagcgccatcgtccccatggtttcccaccatgaccatacggaacatgacgtcaatatcattattaccgagcagggggtcgcggacctgcgcggcaagagcccgaaagaacgggcccagaccattattgaaaactgcgtccacccggattacaaaaacatcctctgggattacctgaagctgtccgacggcaaagcccagacgccgcaatccatcagggccgctttgggcatgcacgccgaactggccagaagcggagacatgaagaatgtcgactgggcccagtataagtaattccgcatgccgtcactcgcattggcatccatgaattcacgttaacccctcaggaccgcttccgcaaagggagcggtccttttccttttttctatcccctctactccttttcttcaccatgaactggatgatttacccggcagccagggctttcatcaaagtctgcgccgttcttttcggcgcgggcgcaacagcagcagccctcatccatctgttcatgccttttttcctccgctctccccggacagccgcgcccttcctgcttttgggaacaggggcggaattgctctccatcctttccctgtccttcctcatgttctggggcgccagagttctgctggcctcccggggaagcaagataacaagaaatctgagcatgctggccttcctgcccgccctgtacgccctcctcattccgtttgcgggcatgcccgcctcatcgcaatatacggaaatggacagggtttgggaggccttcctccttctggcgtccgtcatttctttcttttccttcccttatacggcgggatacggcgccgcaggcaggagattattcctggcctggggcatctcggcggcaggatgcggtttgcagagcgccctgttttttcttgccgtcctgttgcgtcaattcctgaccacagcagttccctccctggcagcgccagttgcatggctggccgttcttttgtcctgcggcctggaaatcatgctggcggccctttccgtcattctggcgcggcgcctgtttaaagaggtcatgtccatagcgtccatgccggaaccgattgatccctccatgccgggcaaccttccctgacttcccccctgccttcatgtttgcagccagttggaaggggttacccccagtccgcggcatgaatacgcgaaccgctcacggcagccttcttccaacccggctgccgcatcccggcatgaaaggcttttacggctttgagcaaacaacggccggaaatttccgcaagtacggccaccgcatggaaagcatcgccgggaagcaaaccgcccccacggaaaaccgcgggatttgcagggtcgccccttccatttcccttgcagaccccagacaaccctatttcaccaattcatccaaataccggccataaccgttattattcatggctccggcctgggaacgcagcgtttccggggaaatccagccgttattaaaggcaatctcctccaggcacgccaccttgaacccctggtggtgctccaacgtgcgaacgaacatggaagcctccagaagggtatcgtgcgtgcccgtatccagccacgtatagccgcgcgccagcttttccacgcgcaacaggccctgcttcaggtattcctgattcacggaggtaatttccaactcgccccgggaggacttgggaatccttttggctatctccaccacccggttgtcgtaaaaatagaggcccgtcaccgcaatatccgatttgggccggagcggtttttcctcaatggaaaccgccttcccctcctcattgaattccactaccccgaaacgctgcgggtcatgcacctggtaaccgaaaatggtcgctcctctcgtcagttcggcggcccgcctcagcttctccgtcaggccgcgcccgtaaaaaatattgtcccccagcaccagggctacggaatcctttcctatgaactcctctccaataataaaggcctgagccaatccctccggcctgggttgttccctgtattcaaaggaaacgccgaacctgctgccgtcccccagcaaatcccggtacaggggcagatcccggggcgtggaaataacaaggatttcccgtattccggccagcatcagcacggagatgggatagtaaaccattggcttatcataaacgggcagcaattgcttgctgacggaaagcgtaacgggatgcagccgcgtgccgcttcccccggccagaacaatacccttcatatcaaattcctagccattggttccaagacgttccaggcggtattccccggacaggatgccccgccaccattcctcatggtccagataccactgaatggtctttctgaatccggaagaatggtcctggcgcggagtccatcccaattccctccgtattttggaagcgtcaatcgcatagcgcaggtcatggcccggcctgtcctgcacaaaggagatttgctcccggtagctccggccgtccggccggggccgcagttcatccagatgggaacacagcagctccaccagctccagattggttttctcgttattgccgccgatgttgtacgtttcccccggttttccgcaggaaacgaccgtcagcagcgcctcgcagtgatcccccacatacagccagtcccgcacgttttcccctttgccgtatacagggatgggttccccgcccagcgctttcaggataacgacggggatcagcttttccgggaactggtaggggccgtaattgttggaacagttggtgatcagcacgggcagcccgtacgtatcgtgccaggcgcgcaccaggtggtcgctggaggccttgctggcggaatacggggaatgggggcgatacggcgtggactccgtgaacaggccttcctttcccagggagccgtacacttcatccgtggaaatgtggtggaagcggaaacgctcctttttctctccctccagggaacggtaatattccagagcggcctgaagcatggaaaaagtgcccatgacgttggtggtcataaaatttcccggatcgtcaatggaacggtccacatgggattccgccgccaggtgcatcacccagtccggagcgtactcccgcaaagtgcgccgcatcagggaagcgtcccggacgtcggcgtgcagaaagcggtatgccggagaatccgccgagccgtccagggaatggatgttgccggcataggtcagggcgtcaatattcaggacttcatggccgcgctccagcagcagcctgaccagattggagccgatgaatccggcgccgcccgtaacgataactttcatagcactgttttcagggaaagatgcggcgtcatcatacagcaacggtgttttttttcaaaacaaatccgcccatgccgcgggaacgtggcggcatgggcgggaaaaagcgggttccgtaaccgctgagacggctagcagctcagctcccggcaaaggttgatgatatcctggttcacggagtactgctgcccggcaacggaatccagggaggcatagccgtactggccgtcatgatacaccatgatctggttgatgtccccgttgttcagagcttccacggcgcgggtggcaaaacgggtgcccatcaggcggtcacgggcagtgggggaaccgccgcgctgcacatggcccagcacggtcaggcgggtatccatgccggcgcgttccgtcagccagcgggtcaggtactgcgccacgcgggtgccttccgccaccacggcaatgatgcagcttccctcctcattgatgacaggctggaggcgcttgtaaatggattccaggtcatacggaatttcagggacaatgcagatatccgccgcgctgcaaagagcggtggtcatcgccagatagccgcagtcccggcccatcgtttcaatcacgaaagcgcggtgatgggaacgggccgtatcacgaacggaatcaatgcaatccagaatcacgttctgggccgtatccacgcccaggcagtagtccgtgccggcaatgtcgttgtcaatcgtggccggaataccggcaaaaggcacttcaaaatcattgaaaaagtcgttcagggcgcggaaggaaccgtccccgcccatgatgatgagcttgtcgatgttgcgtttcttcagatgctcgtaggcctgcttgcggaattcgtagtcgaaaaagcgcttggatcgtgaggaacggaggagagttccgcccctgtagatcatatcgttggtcagttcccgggtggcttccttgatttttccatcgatcagcccttccaagccgtcataaacaacgtacgggttcatcccaagctggcgggcatgatccactgccgccttgatcgccgggttcattccggcggcatcgccgccagatgtcataatggctattccactcataagtaataaggttaacttgtccggggggaaatgttaccgggcggaacaaataatgcaagcgcggagtttttactggcgcaataaacggcaacgcttcatgatgcggaggcatgaacgacactgcagcagccattctgaaagccacggccgccctccgggacggcacggagaagctccggttcgaagccccggtccatgttacctacaaccctctcacctatgcatgggggccgcatgaacagtatgtgcgcacctacggaaacggggaaaagagccatctgttcctgggcatgaatcccggccccttcggcatggcccagacaggcgtccccttcggggaagtggacgccgtcgtcaactggctgcacatccgcggagaagtcgggcggccggaacatacccaccccaaacgtcccgtggagggtttcagctgccccaggtcggaagtcagcggccgccgcctctggggacttttcgcggaagctttcggcactgcggaaaatttcttccgtcacaattacgtggccaattactgtccgctgatctggatgggagccaccggagccaacatcacgccggacaaactgccgacggaacagcgcgccgccgtggacgcagtatgtatggaacacctgctttccctcatcaccatcctgaatccccacacgctggtgggggtgggtgcctacgccacgcagaagctgcgggacgccgcctcccggctccccggcaaaagcttcaccatcggcacgttgctccacccaagccccgccagccccatcgccaacaagctctggccggaacgccccatccagcagcttaaggaactgggcatcttataaaaagagtggaggaggcagagtggagaactccgtgacatgaaaggaatcaccggagcaacaagccggaaatttgcggttcatgttgttcacctgcggcaattcccgcgccacggcgggagcgggcccgtgttttcaaacaatgattgagacgcggcgccggcgtcaccggggcggagaaggacataaacgcctccccgcctccattgcaaaaacagccttccgccagaccaatcatcatctttagccggaaaaccctccgctctcccccgcaggcctttttactggacagggagaaaagggttccgtacagtttccgcgatcttcaagcgttccgaatttatggcaatttcagattacatcgtgaccattggcctggaagtccactgccagatcaagacaaagagcaaaatgttctgctcctgcgagaccggctttggctttgaacccaatacgcgcgtgtgccccacctgcctggggctgccgggcgccctgcccgtcctgaatgagttcgccattgaacgcacgctgctgaccggcctgatgctgggatgttccagcccggagatttcccaatgggaccgcaagaattatttctatccggacatggctaaaaattaccagacctcccagctggatcttccgctgtgcctgggaggggaagtgcccctgtacccctggtcctatccgaatgacgtgatcaaagccggcgtccctcctttccgcaccgtgaagctgacccgcatccatctggaagaagacgcggcgaagattacccatcatgccaattattccctgatcgactacaaccgtgcgggatccgccctgatggaaatcgtttccgagccggacatcgacaccccggaagaagcctacgcctacctcaagtccctccagcagattctgaattacggggatatctccgacgcggacatggaaaagggccagatgcggtgcgatgtgaatatttccctgcgtccccacgggcaggaggaattgggtgccaaggtggaaatgaagaacatcaactccatgtccgccgtccgcagagcccttcattatgaaatccggcgccaggcggaagaactggacatggacattcctcaaatccagtccacccgccgctgggacgacgaacgcggagaaagcgtcgtcatgcgaaccaaggaagacgcgcacgattaccgttacttcccctgtccggatctggttcccgtacgcacggccccgctggtggagaaagtgcgcggtcagattcccgaactgcctcaggaacggcagaaacgcttcatggaagaatacggcctgagcgaatacgacgccaacgtgctggtgggagacctggaactggcacacttttttgaagaagcggcgcggggaaccgccagcggcaaaaaaatcgccaactgggtgattaacaacatttccgccgtgctgaatgaaaaaggcatgcgcccgtctgaatgcccggtgaaacccggcgccatccgggagctgatcgccattattgacgacggcaccgtttccaacaaccaggccaaggacgtattcgccaaaatgtgggatgagccggccctcgccgcagcgcaggccgccaagctgctgggctttgaaaaggcggattcctcttttctggacggcatcgtgcgggaagtcatttccgccaatccggacaaggttgcggaaatacaggggggcaatgaaaaactcctgaactggcttaccggccaggtcatgaaggccgccaaaggcaaagccaacccgaaaatcgtgacggaagcgctgaaaaaagccctttccatggagtaaccataaacaaagagccgcttcccttcccggtgtcctctccttgcccgcagggcatcacggtttgaacagcttcctgtttccggccagggtgttccatacctgcttcacttccccggccagcgtctgcttcatcatggcaagggaaaagtccgccgcctggcccatactgatatagggaggcagggcaagggcgtccctgtccacatgcgcgtccagcagagcggcgcccggataattcaggaacatgttcaccatctggtccacctgactggatttgtccaataaaaaccccttgatgccaacggcatccgccacggcggcaaaagagggattgttcaggttgatctgccacggaatcagcccggccgcctgcatctccaattggatgaaatccagacagtcattgttatacaccacgattttcaccggcagcctgtactggacaatcgtgatgagatcccccagcagcatggacaggccgccatctccgcacagggcaattacctgccgtccggggtattccatctgcgccccaatagccattggcattgcattggccatggagccatgattgaaggaagccagcgtcctcctgccaagcgtagcgcacaggaaccttgcgctccagatacagggggtgccggtatctaccgtaaatacggcgtcggatgccgcatgcctgttcagggcggtcgtgagctgttccggccggatgggagattccttgtcatttccttccatataggcgttcatctctttcacgtccctggcgtggcgtttcagggcggcgtccaaatgcccggaatccgtcttttcctgcaccatgttcagcaacgcctccgccgtgacggaaacatccccgcaaatacccaggtccaggcggcagcggcggcccagcacttcaccgcgcctgtcaatctgcacgatttcaggtttggtgggaatgaaattgaaatagggaaaatccgtcccccacaacacgagcatgtcgctttcatgcatggccttgtaggcatctccccatcccagcagccccgtcatgccgatgcccaggggattgtcatgttcaaaataatcctttcccctccatgtgtaagcaatcggagctttcaggcggtgcgcgagccggacgaccttgtcttccgctcctgcgcagccggcgccgcaaaagaaagtaatgcggcggtggtcgtcaagcatccgtgccagaagggatacggattcatgttcaggaacaacattctcccgcgtgtaggaaggaggatgcaccagattcttcatctccgcgggggcgtccgcaatgtctccgggcaagacgacgacgcctacgtcgcgcctggcccacgcgtgctgaatggcggacatcaaaatgcacgggacctgggaagcttccgaaaccagttccgcatatgcgctgcattccttgaaaagctgttccggatgcgtggcctgaaaatattccatgcctacctggctctgtggaatatgggaggcaatggccagcaccggggcatggttccggtgggcgtcaaacaggccgttgatcaaatggaggtttccggggccgctgctgccgcagcatacagccagattcccgctcagctgggcttccgcgctcgcggcaaaagccgccacttcctcatgccgcacatgaatccattcaatggtcttcctcctcctcaaagcgtccgtaacggggttcaggctatcccccacaattccgtaaattcgcttaattcccgccttttccaaaatttcaacaatctgatcggctaccctgtacatgcagcttagacaccgtcaatctctaatggattcatccttatgtgtcatcttcccgccttttccgcaccagggacaatacctgcggttatcccccaatataagaaataataaggccgccgcctttatcaggcagcggcctgtgaattgaccagttctctggtggaaaactgtcaggaacggcggcggcgcatcatcatgacggccaggcccaggattcccagagaagccgaggccggttccggaacctgaaggccggcaaaaccggcaatccgatcctcagcaagagcttcattcgtccattgaatttcaccccatgtaaggttgggattaatccagctggtgacggaagactgattgccgttcatgttgccgttataggataacgagtcaaagaaatctccgttcacatagacatccacagcctgatttccatttcctcccgtaacggataaagcgatgttcagtaagccgcccgtcaaagaaatagcactttcagaaaggtctcctcgggattgggaaaaagcgcctgtagatgtcgtcaaggctccatcccccattccaagcttgccgtcagcagccaggtacaggctgtttgccccgtaactgtcggtaggccgagaaccaaaatatccgaacagcgcagtctgagatcccgtagaaagagaagaagaatccagccagagagaaatcgtgtaactggaagcatagaaattaccgccataaggaatggaatcaccaggaataacgctgcttgaaagacttccgaacgtcatatcttttcccaatgcaacaccttcagttgtcgtctgcgtaccggaagtgtaaagcgttccggattccggagcaacagagccgggagccgccaacgccggtacggcacaacacgcagtaatagccattaatgctaatgttttcttcattttttatgtatgcaggactgagttattagggagatattccccgccctttgtatatcggattccaaatccggagtcaacctaacatttcagatatgaaaatattattacgatttttctcttctgagaaaaagaatttctgttcctaaacaagcaatttcaaaaccgctgcaaaaaaaattattctgcgccttatttgcgtatgtttacaagttgcagaaaataagaatattacaaatttgtttgaagagtaaaaaagtcttatccccctcttccccagttgagaagagaaagagcggatttggaatccggttgttttcccacagccatcaaaaaagcaacataatgttttcatattcaataaaaattaattttctttccttccatttccagaaccttcttcttgaaaacgagccttccccaaattatcctcccgctagctgtaatatcatttcaccatgaaatttttcaagacaaccattgccatgacaaccctgctgggctgcctgcccacatcccccgcagaagtcgcctttccggggcccgcgcccggaacagccagcgcggaacaagacgcttccggctatactctttccaataacatcctgacggccaaatttatccttcggaacggcagtctttccttcgggggaatgacttccaaactggggcccgtcgccaaggcagggggagacttatttatcatcaatcttcaggatggacggagcattaaatcctccgatctgaaagcgggaaacgtcaagttcaccgccctccagcccaatcccaaagcgttcaggctggctgaccgcttcccgggaaaagccgtcagcgccacgtttcaggctctgaacggcgcccttcgcatctcctggcgcgccgtgctcagggatcattcccattacctgcggcaggaactccgcctgacatgtacgaagcccatccagatgaaaaacatcatagcgatgcaatatgacctggcagaagggaaagccggggcgccctccgtctccggcaacgccagaggcgcgctcatcgtcaatgacctggcgttcactgccctggaaactcccatgggcatcaatactgtggggggcgccggaaatacggcagggggagaaaccgccagctggagagcggacaagtggtccacagcctcatggaccggaaatttcaatgttccccaggaactgaaaaagcagtacggagaacaggtttccagtgcggaaggcccggtttccattgacggcaaaggagcatgcaccgtcactttccagtataagggaggggacaagggcaacaataagctgaaccttgccggcgtgcagctcctctcttccaagggggccgttcttgactccgatttccacaacggcagcacaggagattccaatgccggcaacacttacacggtacaggttccctccaggggaaattacattctgcgctactgggcccagaccaagagcgaaccgattgccagcaagggggaaatcaccttttccctgcccgtgcgcacgctggaggaaaagcaggaaccccaggcggacgaatcccggctggcccagggactctggagccgtaaaaccaccttgcagcccggggaaatatgggacgtatcctccgttctcggaatttttgcccccggccagaaacgccgctccttcctggcctatatggaacgggaacgcgtgatgccctaccgccccttcatccattataattcctggtatgaactgaacatcaaccgcaacaatgattcggaccccgccaagcgcatgacggaagaacaatgcctggccgtcctgaaagactggcaggaacagtttttccagaagcgcggcatgtccattgacgccttcgtctgggacgacggctgggatgaattcaacagcctgtgggatttccacaaaatgttcccgcaggggttcaagcgcattgacgccgccgccggcaggcaaaaggccggcatcggcacgtggctgggtccggtggggggctacggagcctccaagggcaagcgtctcgcttactggaacgtgaagcatccggacaacaagatcggcaatttccagctttccaacaaggaatattttgacgcctttgtgggccgctgctcccagatggtgaaggactacaatatgaagtacttcaaattcgacggcatcagcacccacttccatgccaaggggcccggcaacgaggaggatgcggaaggcatcatccgcgtgctgaacgccctgcgcaagaaaaagggggatctttacatcaactgcactgtaggaacctgggcatcccccttctggttccgttatgcggattccgtatggaggcaggagaatgacttcggcactatcggagcgggcgacaaccgcgacaaatggattacctaccgcgaccgcctggtgcatgaagtttttgtgcagggttccccgctgatgcccatcaattccatgatgactcacggcctgatggtcactaaattcggtcctccggcctgcatgccccgcgatccggaaaacgtcaagaaagaactccgctgcgccacggcttgcggcacttccctccaggagctctacgtggatcgggacctgatgagcgccaacggcggagttctgtgggacgaactggccaaggggatcaagtggatacgccgcaatgcggacgttttggacgatgtgcactgggtgggcggcaatccgtggaacaaggaaactaacgaaggggccgtgtacgggtgggccgcatggaataaaaacaaggccaccctggctctccgcaattcctccgaccaggaaaagagcctgaccggaaccctgcgcagcattctggatatccctgcgaacgtcaagggctccatcaccttcaaggattcctatgacgaccagcggacgctggacggcttctccggcagttccgtagacattgacaaggaaatctccttcacgctgaagccctttgaggtgctggtgtacgaaggaggaaaggtcaaataaatcagccggcccacacggccggccaaagccggaacggcgttgggaaaaatatattgagggaggcgggtatcccgcctccctgcttttttcccgcccgtacagagcccgggtcagaatgttttttcaaacgtcaccgcttccagcggatcggcagggttgaccggcatcatcaggcattccgcaccttccccgcccaggtacaacatcaggcttctgccgggggaataggcgatggagacaccgtaatatcccccctttttcaccagggaccaggttccgcggcaggaagaaacgagatcttcctccagcacggaaaggtcttccctctcttccggacgggaaatccacctgccccatgcctccggacggggaaaggaagaaatctcgcacgtcccgtcttcattcaggaggagcgtggaagaactgacctggaaaaaacgcttcaactccggagggcggaaaaaacgcctctccctgggggaggattccacctcatactttccggaaagggcctgcaggtccggctcatgaatccacaggaaagttttttgacacaccgcctggcggcacgccagccccaccacggccagcagggaaagaaacgccaggacaaacgcccacagggccagccgctttctccaccacgcataaacggcggccaaccccgccacactgcccgcgcaaacccagaacccccaggaacgggaaaggaaagccagggcatccgccagcacggaaaaaccatgagaaagatcattccacataggtgctccagaatctccggaacatagtcaaagtcaagacaacaatgccgcctttcaaggcacgggccgcaggctgcgtcccgctaaaaaactcccgtcatcactcctgaaaatattcctccgcgcttttctcacaggctccaatcaggtaagaagcacctgaaccatgaaaaatgcagcacatcatcaggggctttcggaacagcaggttcaggaaaaccggaccagatacggggtcaatatcctgactcccccggaaaaggaacccctgtggaagcaatttctggagaaattttcagaccccatcatcaaaattctgctggtggccctgctcctgtccgtaggcgtggcctgctatcagttccttaccggagcggaatcggccagcgtctttctggagcccgcgggcatcctggcggccatcctgctggccacctgcgtgggcttcgccttcgaggtaagcgccaacaggaagtttgaaatcctgaaccaggtcaatgacgacaccatggtccaggtcatccgcggcggcaatatctgcgaattgccccgccgggatgtggtggtgggcgatatcgtcatcctgaacacaggggaggaggtaccggcggacggcgtcctgctggaagccgtttccctccaggtcaacgaatccacgctgacgggggaacccctcatcggcaaaaccacggatgaagcggaattcaagaaggatgccacctacccctccaaccacgttctgaaaggaaccaccgtggcggacggccacggcgtcatggaagtgacttccgtgggggacaggacggaatacggcaaggtttatgaaggttcccagatagacaacaaggtgcagacgcccctcaaccgccagctttccaggctgggcgacctcatcacctgggccagctacgccatcgccgccctcatcgtcatcgggcggcttaccctgtatttttcccatctgccgggccccgtggaatggctgagcgcgggaacctacattctgaataccgtcatgatcgccgtaaccgtcatcgtcgtcacggtgccggaggggctgcccatgagcgtcaccctgagcctggcgctgagcatgaagagcatgctcgccaacaacaacctggtgcgcaagatgcacgcctgcgaaaccatgggggccgccaccgtcatctgcacagacaagacgggcaccctgacgcgcaaccagatgaacgtgtacaaggcggatttttacgggttgggggacgccgccccggcggaaaacgagctggggaacctgatccgggaaggaatcgccgtcaactccaccgcctttctggattacgcggacccggaacatatcagggccctgggcaaccccacggaaggagcgctcctcctgtggctgcacgggctgggcgtgaattacctggacctgcgggaaaacgcccgcgtgctggaacagcttactttctccacggaacgcaagtacatggccaccgtggcggaatcccccctgctgggcaaaaaagtcctttacgtgaaaggcgcgccggaaatcgtgctgggcctttgctccactgtcctgactccggaaggccaggttcccgccgcagacatgcgccccgccattgaggaacagctcctggcctaccagaaccaggccatgcgcacgctgggcttcgcgtaccgcgttctggaggatgacgccccggtattcgaggacggccgcatcatccgcaaggatctggtttatctgggcatcgccgccatttccgaccccgtccgggacgatgtgccccaagccgtgaaggactgcatggacgcgggcatccgcatcaagatcgtcacaggggatacccccggcaccgcacgggaaatagggcgccagatcggtctgtggacggaggaggacacgccggaccgtctgatgacgggtgtggagtttgagcagactccggacgcggaactgctggaccgcgtgatggacctgaaaatcatgtgccgcgccaggcccatggataaggaacggctggtcaaactgctccagaagaaggaccaggtagtggccgtcaccggggacggcaccaacgacgcccccgccctgaacgccgcgcaggtggggctttccatgggagacggcaccaccgtagccaaggaagccagcgccatcaccatcctggacaattccttcatgagcatttcccgcgccgtcatgtgggggcgttccctgtacaggaatatccagcgcttcatcgtcttccagatgaccattaacgtggcggcctgcctcattgtgctcatcggcgcattcctgggcacggaatcccccctcaccgtcacgcagatgctctgggtgaacctcatcatggacaccttcgccgcgctggcgctggcctccctgccgccggacgaacgcgtgatgcaggacccgccgcgcaagaccacggaccacatcatcacccgccccatgggccggaacatcctgggcgtgggcatcctgttcgtcgctttcctgttcggcctgctgcaatatttcaagcatgcggacattaccagtctcacgcagttcagcctcagcggctacttccgcagctacctggacttctccaccccggaacatgaactgacaggttatgaactgtccctgtttttcaccattttcgtcctgctccaattctggaacatgttcaacgccaaggcattcaacacgcaccagagcgcctttgcacgcatgggcgccagcattggcggcttcggcctggtagccctgcttatcctggccgggcagtacctcatcgtcaccttcggcggcaagatgttcaacgtggtgcccctgagctggacggactggggcctcatcttcgcaggcacctcccttgtcttgtggttcggggaactggcgcgggcattcactccggataaatccggcgcccgctcctgaaccgtccgggagaatccccccccgcgcatgacgcggacagcgacgccgcccggaaaaccttctttcaacaaagaagcccgcgggcgtgtcactcccagcatggacttgacacgcctgacgggctctatctccggccccgccgttttcctctgcctgctttccctcttttttgccgggtgtaaaaagacggaacaggtgccgcatgaaacgcccacaattatttacgaacatcccgtcaccatggatattccggtgacgggcagctgggtgggccacctggacggcgtggacaacgcctccatcgtcccccagattacgggctaccttcaaacgcagaattacgccaatggcgctattgtgaagaaaggggaagttctcttccgcattgacgattccacgttcagggaccaggtatccaaggccaaagccaccctggcccaggcgcaggcccagctacagcagttgaattacgacgcggaaatttacaggcccctggccgcggagaacgccatttccaaacagaaatacgaggatacgcgcctctccgccctggccgcggaagcgcaggtgcagcaggctgcggcggccctggccctggctgaaaaaaatctttcctatacggtgctgtacgcgccttttgacggaatagccggcatttccaggacaaacatcggcgacctggtcagcccggaaagcggcccccttgccgtcgtctcctccgtcaatcccatacgcgtcaatttcgccgtcacccagcaggaatggattcagcaggcggggaaaaacgggaatgaaggcgtccagacgggcagcaagctggacattacgctgaaagacggcaccaaatacccggaacaagccacggtagttgccattgaccgggcgttcaatccccagacaggcaccatccgcgtacaggccaaccttcccaatgcggactatctgctgcgccccggcatgttcatcatcgccacggcccggctggccaccgtcaaaaacgcgctgaccgttccggcaaaatcccttctttcgacacaggggcgctttttcgtgattgttctggatgagggcaaccacccttccatcatccccgtacaagccggaacgcaacttggagaccggcagcaggttactcccctgaaaccggattccctcaccccccaaagcaaagtggtcgtggacggtcttctccaggcggaagcagcctccagaaatccgaccgcccgcctgaaagcggtacccgccagcaaccaataagctcctcccgccatggctgatttcttcattaagcgccccatcctttccatctgcctctccgtcatcattgtcctgctgggggccttttccattctgcgcctgcccatctccgagtacccggacatcattcccccctccatccaggtgacggccacttatcccggagcggactgtgaaacggtggtcaagtctatcgcatcccccatcgaacagcaaatgtccggcgtggacggcatgtcctacatgacttccgtcaacaccaacaacgggcaaatgagcatgatgatcctttttgaaatcggcacggaagccaacatggaccaggtgctttcctacctgcgctacgggcaggccacctcccagctgccgtcggaagtcagcgcgctgggagtctccctccgcaagacaagcgggctgcccgccctggtcgtcagcctctattccccccaggggacttatgacggcctctggctggccaattacgcctatatcaatatggtggacgccatcaagcgcgtgcccggagtaggagacgtgcaggtgttcggggcaggccgctacgccatgcgcatctggctgaacccggaaaagatggccgccctgaatattacggcccgtgacgtgatgctggccgtccaggcccagaatgccgtaaatcccgcgggcaagataggcgcgcagcccgccccgccggaccagcagctttccttcaccgtaaaagcgcccggacgcctgaccagcgtgaaggaattcgaaaatatcgtggtgcgcgggcaggacagttccatcgtaagagtgggagatatcgcccgcgtggaactgggctcggaaacttacagcctcagttcttccgtaaacggcatgcccgccgcttccatcggcatttacgaggcgcccggaggaaatgccatccagctggtggacaatatcaaagccctgctgaaaaatacggatatgccgcccggcatggattacctcgtttccctggactccacgctggccgtccgcgccgggattgaagacatcgtcagcacgctggtgattgccctgggcctggtggtgctggtggttttcattttcctccagggctggcgcggcacgctgattccggcctttgccgttccggtgtctatcgtgggcgctttcatcgcctttccattgttcggcttttccatcaataccatctgcctgatggggctggtgctggccatcggcctggtcgtggacgatgccattgtggtggtggaagcggtgaagaaccatatttccaacggagaaaagcccctccaggccaccattgcggccatgaaggaagtatccggccccatcgtcagcacggcgctggtgatttcctgcgtctttatccccacgctgctgctgcccggcgtcacaggcaaactgtttgaacagttcgccgtgaccatcggcatgtccatcatcatttccgccttctgcgccctgtccctcagccccaccctgtccgccgggctgctgaaagggggaaaagctgactccattcccctgccggggccctttttcaaattgttcaacaaggggttcaacaaggcgcgcgactggtacgtggaaatctgcgccagacttatccggcacatgtggctgtccatcctgctgctggccgccatgaccgcccttctctttcccctggctaaacttattcccagcggattccttcccaatgaagaccagggctacctgttcggcggcgtggaactgccggacaatacatccctgaacgtcacggcggacaccgccgcgcggattgaaaaaatcatcagggaggatccgggcgtggacgtagtgactaccgtaaacggcttcaacctcatcagctccgtccaaagctcctccaactccttcttcttcatctccctgaaaccctggtccgaacggactgctccgggcatgacggcggacggcatcgccgcacgcctgaaaagcaggctgaacgcggaaatttcctccggcgtggcgtatgtggttccgccgccgcccctgcctggcgtaggaacgtccggggatgtcacattcctgctggaggaccgccagggcatcggggaaaaattcctggccgccaacacgtccaaattcatcgaggcggcggaaaagaggccggaaatagcgggcatcagcaatttcatgtctccctccaaccttcagtacaacctgaatgtaaacacggagcaggccactctccagaatatggacgtggatgagatttacgccaccatccaggcatacatgggaagcaccttcctgaacaacttcaatatttacggacaggaatggcaggtgtacatgcaggcggacgcaccgtaccgggacagcatcgacaagctttccatgttctatgtgcgcaacaatgaaggagacccggttcccctggattccgtaatcaacgttacgcacggctgggccccggaattcctgatccgccagaatatgttcaacagttcccagctcaacgtcaccccggctccgggctattcctccggccaggtcatgaacgccctggaagaagtttttgcccagaccatgccgtccggcatgggatacgactattccgggatgagctaccaggaaaaacaggcgcagaaaggtatcaccatcggcatgatctttgcggcatcagccgtgtttgtctttttgattctggcatccctgtatgagagctggtccctgcccgtagccgtcttcatgaccgcccccattgccatcctgggagcatttctggccctgtggataaccgggctggacctgaacatttattcggaaatcggcctcatcgtcctgattgctctggcggccaaaaatgccatcctcatcgtggaattcgccgtgctggaactccgtcagggcacggacctgctcacggccaccctggatgcggccagaatccgcctgcgccccatcctgatgaccagcatcgcctttatcatgggctgccttcctctggccgtagccacgggagcgggagcagcggcgcggcaggtggtaggcgtcggggtcatcggcggcatgatgacagccgtcttcatcggggtatttttcattccttccttcttctacctgattgccaagctcgccgggctggacaaaaaagcggcgcggaaacttcaggaaaaggagcagggagcccccgcccccgcgaagcaggccgaatgacacttccgaaaggggaaaacggctcccgcacagtttcccattcctcctacatccagaatatccaggcccagaaagccttcacgaacacgagcaccacgttaatcagcagccccacctttaccatggtcatctgagggaattttcccgtcgcgaaggccagagcgttgggaggagtggaaacggggagcatgaaggcgcaggaagcgcctatgcctaccagaagcaccagcggcgtagcagacatgcccatggcggaggctaccgtgaccatcagcggggccaccagggcggcgctggccgtattggaacagaattccgtcagcgacgtgatgaagaggctgatgatgagcaggatgacgatggggctgtgccccatggcgagagaagatacctgatccgccaggaatcccgccgcccccgtctggacgaggatgctgctgagcgtgatgccgcccccgaacaaaagcaggacgccccagtccgtatttttggcgatgccgctccagttgataaccccgcacagcggcagcagcaccgcagcgctcagcgcgatgagcgtgtccatggacgggatgccgcccaaagcagaggaaaggaaactgctgcacatccagctcccggccaccagcacgaagagaataaggacacgcacctgcctggcattcaacctgccctccgttccctccctttcctccggcaccatatccacatgcatccccagattcgggcggaggaacaggtacatcaggaagaaaacgatcaccccgaacaccaggacaatgggcatggcaatccggaaccattccgcaaaccccatgcctagttcatgcgccgcaatggcgttgggaggagaacccaccagcgtccccatgccgccgatggaggcgctgtacgccacccccaggatggcaaaaggagccgtcgtcttaagtttttccgccggaacgcggtccagaaggccgatcaccagaggaagcatcatcgccgccgtggccgtattggacatccacatggaaagaaacgccgtagccaggaaaatcagaatcagggccatccccaggctcccgcgggccatccggaggatttttcccgccagccaggcatcaattttctgttcgtgaagagccccggccagggcaaagcccccgaaaaacagaaaaatggtaggatccgcaaaaccggacagagctttctcccccggcagaatccccataaacatggcaagcaccggcaccagcagggaggttacggttacgtgcagggcttccgtcagccacaggatgccgataaaggtgagaacagccagccccctggctacctccggttccacgggaagccacttgagcatagccaggaaaagaagcacgtcacacgcaatgatgacgtaattgcggtgccctttgggagtgtcagcagtacggtggcgcataaagtaaagataaacgacgctattttctttgtacgcatcagaaaaacagtgtcaatgcttttccataaaaccccggaaaaggccttccccggaaacagggaaacacggaccagcgcaccggcttgagaatacgcacggcacgcatcaccgggaaagccgcgccacctcttcccgctccgggaaaatacaggaagcccggacatgcaaaaaaaccgccatgcaatcgcacggcggcttgtaaaactgtctgattgatgcacggaggggaaacctccgcccgggcaattattcggcggcgggttcagcggccttcttggcagccggctttttggcgggagccttcttggcggcggcagccttggtttcagtctttttggccggggccttggccgcagtctttttggcgggagcttccttggcggcaggcttggcatccttggcaacgggaacggccagacggataggcgcattggaattcaacttggactgttccttcttacgcttgaggtattcaatacgtctgcggcgcttggtgactttgcggatttgctgtcccatagtgataattgctatgatatttactaattcttaagagctccatgtggcacatgggcgtggatacaactaccaaccccacctcccatacgcaagcacaaagcgttattaaggcacagaaaggcggcggcaggccccggttttcccaccccgcgcgggagaggaagacaaccggggcaaaggaggttttaccacaatttcagcgcatccacccggaccggctgttcccagcgcagatggtgccggatggcggaagagatgaattccaggccgcgctccaccgccgcaaccagtccatccccggcggccagccgcgccgcgacggcggcagacagggaacagcccgttccgtgagtgctcacctcctgtacgcgcggacgctcccattgccccagcaggcagccgtccgggccggacagcacgtcccggcagtccccctccagatggccgcccttcagaaggacggggcatccgtacctgacggcgaggcgcgcggcggcctccggcagttcatccctgcccggattaacagaagaacggagcaggacggcagcctcatccaaattgggagtaagcaacgccgctcccggcagcaggagctcttcgtaaacggccaccgcctcttcccgcatcaggcggtctcccgccgtggcgatcataaccgggtctaccacaacggggacatccgccccggccagcacctcatgcaccgcacggacgatagccggggaatacagcatgcccgtcttcacggcgcgcacgggaaaatgttccagattgatgcgcacctgatcagccaccagcgcagggtccacctcctgaatgccgcgcactgtcccgggcgcctcggacacgacgcaggtgacggccgtaagcgcaaacgcccccatggcatgtgccgctttcaggtcagcctggagcccggcccccgcggagcagtcggaaccggcaatcgtcatcattacgggaatactcatggccctgtttttaatcgggaagaaagctcttgaacatccaaaaatccgcacgcgccgcctcaatgtcacaaatccgggtgggaaaacaaggagggaatgccacaatcatcccatgatgcacgcttcccccgccccggacgaacaggaattctggcttttcattcaggatgcccctctgccggccgcagaggaattgcaggagagcatgttccgcctggatggctgtttccggctgaacctttccggcgcgccggaaaacgctccggaccatgtgctggaaggagaatatctggatgaagagggggaatcccagctggacgtattctgggtcatggaaacggacgacgcgcgccaggcgttcaaaagggacggcgcggccctccggcagatagggaaccgcaccaaaatgctgcgcttcattctggaagacgaatatgccctgggccatgtattcgccatgatgcacgccatactggaacaccgggacggcctgctggtcattccggactccaggggaaacgttattctggaacggaggaaagctttggatttcctgaacagggaaatcagggaaagctaatgtttctgcgtctgcggagctgaaccgccctcgcgctccgcattcagttgaagcgctttctttttccagacttccgccatatccgcatcctgaggggtcccctttccggtgctgtagcagacggaaagcatcagcatggcgttgacgtggtcctgcccggcggccagccggagccagttgaacgccttgccctcatccgcagacacgccggaaccttccagataagccagtcccacgatatactgggaatgggcgtctccggcagaagccgcctgttcataccacttcatggcacgctccatatcccgcgccactccctgtccctttgcgtaaatgttccccagataaacggacgaaggcgtattccctccattggcggccttttccagcagcgccaggccggaagcggcatccttctcaaaacccatcttcccctccatgtaagcccggcccagcagccccatggcagccggatgttcctcatccgccgctttgtgccacagccccagagccttgttcaggtcctgatccgcgccatcccccttgaaatacatcattcccaacatgtacaaggcgttcccccgctgggttcccgggcgggcaagcccgtactcaaaccactccctggccgctacggcatcacgcttgattcccgtcccatacaggaacatggcgccaatgaccgtttccccggaatacccggacccggtctccgccacggaatcacaccaggcccgcacgtccagcggatgaacccagccattctgcaatccctccgcatacagggcagccacatcattgagggcttttacatgctcgctgccattttccttctcgcggccggcgccggccacagcagcgtccaggcgctctctccatatttccgcctctttccgcaccgcagacggcttttcccgttccgctgaaggagcagcccgcttttccccggaagaaggggcgcggtcacatccgctcaaaaaaaagaaggcgaaggaagccgcacataaagagacaacttgtttcatcatgacccttaccataagacagcctcaccaggctgccaagaagagaaatgacggaaacgccgcatccgcacgccacggaagcgcgaagccggagagccggatttcctctttttgcattgaatatttccctctttttgctctactgaaaccagttctacctctgatgaaattcattctgcccctgtatctcttgacatgcctgggcccggcgttcctggtaagtttttcctgccggggttccgcgacggaacttcccgtaaaatacatctttgagctgtcggatgaaccggtaaaagtacatcccggcaaaatagataccaaaagcgttttcttccccaaatacgcgcgcggcacatctccggaaaccctgaagcggcaggccgcccttttccaatcccatagtccccacgaagcttccaaaagcaaaccggccatcagcatccacatgaatgacgacaaaacggaaagggacgtccatgaacggtctggttatgagtttcaccatgcggaaaaccaggaagaaatagtcatcacaaccgaaacgccggatgaggaagtctggctgaacgacggggatccggacagcccctttttccatacgccccgttccgccgccaatacggaaattcgtgaaatccccacgtcttccgattcctggcccgcctggaatgaagaggaagtcaacctgcacatgaatcttccggaatcggcgccgcgccccctagtagtgcagccggctccgtccggagccatccgcaccatcatcaaatcctttaacggaaccgtttttgaggcggatgcccagcccatgcatcccgtctgggatcagctcccgcccggatacgttcctatcccggctctcccggcctatcagcccaccttattgaagaaattacaatagaagggggcaaaagcctcagaacttgaagcggacagccccgaaaacagaccatccgttaaaggctttggccgttgccgagtccacatggctggtgacatactctacagccagcatcagcttgaccgcattgacggcctccggacacagatagcaattcagccccaggtaaaaggaatgcatgctgtccacccatgcgggataatgggtgacgctgggcacataacgggtattcagcttcacagaacggtttccaaaggaacactggtattgaaagacgccctcaaaatgcggggaaatccggtaaacgggctgcagaaccaggccgtacacattctttgcaccgggctggcctacaattcccacgcctgccagcaaattccccatgatggagaaagcgccgcggctggcgtcccagctcagggaaatcacgtcctgcgcgcccgttccgcagtaatcggacgtggaagggattttccttccccgccattccgtaaaattatgggcatactggtaccccagaaactggctgtcccacatgggagaagccaccttccacttcatggcgttcaggataaacaggttgtctgcagaatgaaactggatctcatccttcaaatccgtaccgttcgcattcaggtaaacgccgtaggaatggtacaggctcttggcatccttctgaaaattggcctccagaccccagttggaaatgggaatcaattcattgcacagggcggatctttccactgttttaatccgggaggaagccaggcaatactccgacgtcaggtgaggcgtcagcttaccggccctgaacttgacgccgggcatggtcttttccagataaagttcatacagggaccactccgtatggctgccgatccattctccccgcacttcacggtgccggccttccaaatcccccacattcgtcagattggacaggcgccaggaaccgtcccccatcaggatgtcgccgcccaggtaagcgcgcctccacccgttgttatggccgccggaagacgggcagaatttattggccccattggggctgacggctgctgcctgatactggccaatcagcgtcagcttcaccttcctgatccatgaggaatcattccggtacagcaccggaccgcgatccagcacacggcacagggacggcagagagcccccggaaaccggctgggactgaactgctcccacaccggcttccgccgccggaaaggcggcataccaacaagcggccaacaggaacattcctggaaaaacaagcttcatcataggctaaacaaacaaattgggcgcacatcttaaggagccctctccgaaaatcaagcccggatgctcctttcgacattgttgttttctgaaagggttgttacgaagaacggcaatgatggacgcaccagtgcgcccatccggaacgtctccatcagaaggccagggacgcaggtttcagcacggcttggagttacagctacatcggcctgttgtatctccggcctgatgaaccgggccatttcaatcacttcctgtacgatgaagaaacaacgatgcagcagcctggcatcatcgcgaacagttaccggcaccaaatcatcactccggcaagctttccctcccggcccgcatgggggaacatgcctgaataattatttcccgctcctgcggggaaaggccgtaaatgtcttccatcagcccattcatccgctcatccccttccgggcaatagcggaccgcgagagcgtccgccagcccttccacttcccgcagcagggacagaccggggacccggatgggagcccggaggacaggggcggtatccatctggaaaaaatccccctgcatttttccccggcggagaaaccaaaactgcatcaggcgcgaattgaacagggccgccagatatttcatgctcacgcgttccgagcgtatcacgttgaatgccatcatcacataagcttccttttccgtataggagaaggttggacgggcacacttcctgacagccagaattttggggccgggccggaaaaaacgttcctgccggggccagtgcacatggtaatatttcatgcggcccatgcgtgtttcccgccgggcctccatcaggggacggaatttttccaaatggcgcaaaagcgtaacggcctgctccgctccgttggacggagtcagatataacagcaccttctccggagctttcagtgcatgccgccctgcctggacaggttcatacagaggtttgagaaaacgccgctcccgttccggcaacaggccaaaatacccctgaggcaagacaaataccccatcccccctccggattccgtaccgccgcactgtttccggcgccagattctccagagctcgggaagaaacgacgtcaggattcggcacaatcccctgcgtcatttcctttgcggcatccagcctgaaattccggcaggcatccatcttttccagaagatgccgctctgctgcagagcagaaggacaatccttccctgacgcacgctccggcatcttccggcaagggaaaccgacggtacggctcatgttccagaaatgattccacgtcattcaaggagccgccaaaacggcggtattccggaaccaggcgtccgcctccctctccctttttctccgccagaacagtcatggtatggacgcgggcggattcaaacacgcggcaggctccgaaatccgacaggcgcagcaaaccgcaatcttccagcagcttgcggcggagagaggcggctcccgcattagacatccacttgttgggaacgaccagatgcattacgcccccccgcttcagggcatccagccccacacaggcaaacacgtaccagtaatccatgcgggaagagcagtaggaagcaagagaagaacatttcaaacggtcaaataattccttgttccctttttctccgacaaaagggggattgccgatcaccaggtcaaagcctccttcctccatcaccgttgaaagaccctgacgccagacgccggacgcagacatatccagactgtccccgcacaacaggcgatcccgtaaatccccctttcctccggcggccaaccatgcgcaacgaaaacggaaacgggccacctccaatgcctccgcgcaaacatccactccgtaaatattctcttccaaaacggcgcggattaaatcgggctccgggcaatccggttccagaagctttctgcgggcgacaagctcccggagcattcccatggtgaatgctccggcccctacggataaatccagcacacggatacttcccagcaacccggcttcttcatcaccgctcctgggagaaggcaatctggattccagccaggaagataccgcttcccgggccatccagcgaacaagaaaaccgggggtatacaccgtcccggaacggcgggcgtccgtcaggaaacgccccagcaatccttccagcacggaaggagtaacagcccggcaggcatcctcttccctcaaggaaaaagcgaatccccccggcagccggccctcatggcctgcctgccgtttctgcaagttgtccatcaaaacctctttcaatcgttcccaggtttcaggacggcccccgttgcccttctccacggagaaatactgagctataaaacaatcctgaacgttccgctccttcactgcggcattcgtacactactggaacaggccgcgcaaccaaaaggagaaattgtccagaaagccagcttcagaacatgaatgcccggaactcccttttctgaacattcccggcgccccaaaaccgtatcaaccaccgggaaggggtcattcgaacagattcacctatatgagcgcatattgaaaaactttaaccgcccgataaacatttgaaaaatatcccctattattattttccggcgcagcgctggatgaaaagtcaatcatggccatgatgaatcaatcgaaaagcgcttccggcagaaagggaatttcaagcatcgatgagacaggaggctaaggcaggaaatgccccgccagcctccccatgctgacgttgtcaccttcttcaaattcagaagaatttcctcaattcgtctctctattcccttattttgcaataaataaaatccggctttgccatcagcaagccggactagaaaagaaatggtaccccgtcacgggctcgaaccgtggacaaactgattaagagtcagctgctctaccaactgagctaacgaggcacaggaatgatggcgttccttgcaggaacaaccggatggtaccccgtcacgggctcgaaccgtggacaaactgattaagagtcagctgctctaccaactgagctaacgaggcatgtatccggcgattcccccgcgacaagcaccacccatgaagatggagccactggtcggaattgaaccgacgacccacgcattacgaatgcgttgctctacccctgagctacagtggcatcgcgagaagcgcacaagcaagtaatcataagcaaccccttttagcaagtcttttttgcaataagaccgtttttttacgccttgaatgcggaataaaagccaagagcggcaggtgacagtagaagagcttgcataggcgggggaaacatggtggagtgcatgtcctcaaagagcttttctttccctacttatcatgaaggcatattacattttccagcaggcggacgaagaaacaatcagcaacattctggactggatgcgcaaccaggaacgcgccatttaccgcgctgccgtgcgtgaacttggagccctgaaaaaactgcgccccgaattcatccagcgcaaacctcttcaggaacaattttccttcatcaagaaaatgctgtcatggaaacccagcaatgaaatcggtgaccatctgcttcaggtctggctgttgcgcaaacaccaggacatgctgattacgttcctgaataccctgggcatcccccatgacggcaacggcattgtcaatgaactgccggaaacgctggacaaggagaaactcgccaaagctgtggacgaactgttcgaaaaataccctgccggcgtagcgtccgtctacctccagatgttccagctccagacggaagacggctgggaagaactggccgaggttctggcgaacgatccccgcgttaccatccgttgacgttattctccttcgggacataaacaagggccactccgttccggggatggccctttttatggaggcaaacggacgctcctgccgctgttattccagttccaggcggaacaggcgtccggacggcacgggacctgtttgaaacagctgcaatggaaagcatgccggaagcgcaagcccgtcaggaaggaacgctgtccggctgttccggatggaatgaccacccctcatctccgtggtacaccatcatacgggacatgccgccgtcaatgaccagattctccgcattgacaaagctggagccgcatagaaagaaaacggccttcacgatatcttccggcgaaccgacgcgcccggaaggatgctgaaaagcatcttccggagacaggacgccgaacacccccgtgtcaatccagcctggactgatactgttcacacgaacgccgaaaggggaaaggctcatggcgagagcgtgagttaaagaagtgagggcgcccttggccgcactatagctttccgtatccttccgggacatggaagcgcgggtggaagcaatattcacaatggaagcgccgcgggaaaaatggtcgcgaaataaaaggctcagcagatagggcgcggaaactcccacgcgcaaaacttcattgaattcctcgaaggaacagccggaaagaatgccgcgacgcgtgatgcacgcattatttaccagcacatccacacggccaaaacattccaacaccttttccgcaaaagaccgcacgtcctcttccacacccgcgttgcccgtcacgcaaagatgcccctctcccggcaattcctccagcagggaggccgtttcctcatgcttcacatccaaaaccgccacccgggcgcccgccgcagcgaaagcttccgcaatggcgcggccaatgccgcaggctcctcccgtcaccaccacggtactgccggaaaaatcaacatccttcataggctgattgtcatattccactcaagaaagtcaatcatcgccttccggcatacggtacttaacgtgcatacattacatcgcggtaaagccccatggctctggaaaggagaggagaacgggttaccacgtccgtttccacaataagacgggccatggaaccggaaacggccatttccgcttcctccgcacggcggctgatacgctccatatccccggttttcaccagattcatacgtccggatttttggaaatcatcaacagcatagcgcaaccttttcaacttggccaccacttccaccagctccatggcgcactggtcagccgttccggcatccttgatgctgcgcaggagaaagtcaattctctccaggcacgcgcagaactcttccatggccgcgacaggatcggcccagaactcctgaaaatcgattagcctgggttgctctattttgagcccctccactgccttttgcatggaaggggaatcatacatcctggccgtcgtgagtttcaggagcgcccggaaagcgcgtttgcgctcatcctccgccttctttctcatcttttccagcccatcatggaaatgccgttcaaaaccgggaatccagtctccatacttcttctccattctggcaatgttgttcatctgctccctgaccattcgtccctgaagggctacagatacggcataggcttccgccgcaactttattatcaatcccctccagcatgtccaccatggtggaatactgttccagataagccttcagaaacggctttatcttgttgttcaaatacagggccacccgttcgtccgtcaggctgagaccgcacttttccagatcattcctgatgacatcggaatcataatacctgaattcatggagcttcagtattcccgacatcatccggtcgcgggccttgtccacgcgctcccggagaatggaatgaaaggcgggatgcatcttacgcgattcttcatgcacgcgcggattcagagccatcaggcgcccgcaattcatatcgtaaaatttaaacttctccgtcaggcgcccaagttcattcatcagggcctctcctgcggtacggtcctggatggaaacgaccagatccgtcatctgttccacttccttcaggcgcagggaaagcagctcttcataagattccaccggggaaagcctttctgacttccctgcttccgcagccccggcctcctttcccttatctccgcaggaacacaaacacagcgccagcagaagcgcgcctcccatcaacggcaaattcgggaacagagaaaaacaggagccaagcttcatgagaacgtagcgttgaggagggagaatgaaactccggcccgcatcgcggcaccggaactaccgtaaaaaagcgtcatcaaagttcaaggccttttcatttcatccgggaaaaacatttccgttccttcgacggaaaaaatattcatttaatataatgaacactcttctgaatcgggatgtcgcactcttttatccatatcatcctgtctgccgtgattcttgatattcttcaatacggacatcctcttttgagagaggaatgcgggcccgtggttcatatcaacagggatatcctttccttcctggacgatatgcaggaaaccctggcccagggaggcataggcctggctgcgccgcaggtgggcaggcccatccagctggtcaccatcaacatcccttccacagacgcaaccactacctggctggaagtggacggatgcccaactacgttgtcccgaatcatgcccttgaattttatcaatcccatcctgcatcccttcggcaaaaaagtgccgtaccgggaagggtgcctgagcatcaccaaagtatatgcgaacgtgatgcgccgctcctgcgtaagggctgttttaaccatgatggacggacggactgtgaccgtgaaatgcaacggactgctggcgcgctgcctgcagcacgaggtagaccaccttcacggcggcctgtttacggatctggtttcccccggtgaccatgacaaggtgatacggaggctcagattgacccatccggacgcttttgaagaagatgacgacagctacgctcgccgcatgaaggaaaaacgccgcgcccaggcatggaaagcccggatgccgcagcctcccggaaaaacagcctgacgttcaggcaacaaacctatcccccctttttactgcccttccctaaaaaacgccccggtctccctccaggaaaccggggcatccataatcacatggaaagaaaaagagagaatcaaacaatccagtccagaacaaccttgccggattttcccgaattcatggcttcaaacccttcccggaattccgtgtagggcagacggtgcgtgatgatgggcgccacattcaagccactgcggatcatggaatccattttatgccaagtttcaaaaatttcacgtccataaatgcctttcatcttcaaccctttccatatgaacttattccactcgatgctggaaccatcgggctgaatccccagcagggaaatgttggctccgttgcgggaattgtcgatgatgtccttcaggcaggacggagcgccgctcatttccaggcacacgtcaaatccctccgtcatttccagttccttcatcacgtcttccagcttttcacgggtcacgttcacggttcggtccgcccccagcgttttggcaagacccaggcggaaatcattgatgtccgtaataaccaccgtcttggctccggccttcttgcagacggcggcagccatgcagccgataaccccggctcccgtaatcaggacgtcctcgcctaccagatcccaggacaaagccgtatggacggcgttgcccagcgggtcaaaaatggaggcgatttccatcggaatgctcttgtggatgcgcaccacgttatcctgcggaatggaaaggtactccgcaaagcagccgggcctgttgactcccacaccctttgtgttgggacacaagtgcttctgccctgaacggcagctgcggcaatggccacagacaatatgcccctcaccggaaacaatctccccgggcttgtattccgtcacggaagaacctacggactcaatcacgccgcagaactcatggcccacatgcatccctaccggaatggtctgctgggcccatttatcccaattccaaatatgaagatccgtgccgcaaatggctgttttatgaattttgatcaggacgtcattcgggccgacttccggcataggaacatccatcaattccaaaccggggccagcctgcgtttttacaagagctttcatgccccccattcatgctctttttcccctgcgtcggcaagctcaaaattcatttcggagcgccgaaaaagcctagggaacggaggcttccgcccccccttcccttcccatggaaacgcccggagcagcggcgggcgacaaacgccggaaagacattcctgttcaatcgacaattcagacacacacgcaatttgccctttccaacaggaaggaatcatgataccaaggcgtgcgagttctccttttgaacactttactctatttacagaaccatggcgaaatcatttttacccaccattttcgagcacccgtatgaaatagaccccaaatatggaaaaagcgttgcgtacttctccatggaatacgccattgataattcatttaaaatctattccggcggtctgggctacctgtccggctcccatatgcgcagtgcgcatgatctgcgccagaacctcgtaggcgtcggcattctgtggagctacggctactacaaccagatccgtgcggaggacggatccatggccacgcaatacatgcgtaaaaactacccgttcctggaagatcacaacatcaaattcctcattcatgtctgcggagctcccgtctgggtaaaagcctacttcctgaatccggaaacattcggcactgcgcccatgttcttcctttccacggacctggaggaaaatgacgaggaaagccgcaatatctcccgccgcctgtacgacgccaacggcttcacccgcatcgcccagtacgtactgctgggcaaaggaggcgcccgcctttttgacgaactgggcgttgaaccggaaatctaccatctaaacgaagcccacggcctggctgcggccttccacgtgcttgccaagacgggcagcgtggaagaagtgcgcaagcgtttcgttttcactacccataccccggaagaagccggcaacgaaaagatggacgtaaacaccatgaatacgttctccttcttcgacgggctctccatggaacaggtgcgcgccgccgtaggcatgacggacaatacgttcaactacacgctggccgccctgcgcctctcccacatcgccaacggcgtttccaaactccatggagaagtatcccgccagatgtggaaggactatgagggtatatgccccatcatccatattacgaatgcccagaatcagaaatactggcaggatccggaactggcggaagctttccaggcccgcaacaaggaagcgttcatccgccgcaagcgggctttgaaaaaagctctcttccgcatggtgggtgaacaaacgggccgcgtctttgacccgaactgcctcaccatcgtatgggcgcgccgtttcgcggcctacaagcgtccggacctggtcaccggcaatcccacgatgttcgaacgcatgctccagcgcaccaactatccggtgcagttcatctgggccggcaaaccctacccgatggatcatggcgctattgaaatcttcaaccgcctgaatgacttgacggccaaatatccccgttccgccgtgctcaccggctatgaactgggcctgagccgttacctgaaaaacggttccgacgtatggctcaacaaccccgtggtaacccgggaagcctccggcacttccggcatgtccgctgccatgaacggctccatctccgtctccaccaatgacggctggatctgtgaattcgccaaggacggagaaaactgcttcgtcattccggaagcacccgcccatctctccccggaagcccgcgaccgctccgaccgcgataacttctacaacattctggacgacaagattcttcccctctactacgatcacaacgacaagtggatggacatcgttttcaatgcgatgacagacatctatcccgaattcgactccgaccgcatggcggatcagtactacacggaaatgtacaacagctaagatacaaccttgtccctcttacgcaacggccgcctttcttcaggaaaggcggccgttctttttgaaaccggtgtcaaaaatccacgggaaacggttcaggcttacttgggtacttcctcctccccggcctcagccgccaccttgtctgcatctcgcttatgacggtgcgcaaaaacattctcctgctgccatacgcgggaaaaagcagacgtaatcagccctgtggaaatagcaatgatggacacggcaataaacataatcaccccggtaaaaatacgccccatgggagtaataggaaccaggtctccgtacccaaccgtacttaaagtttccacggcaaaccagagcgcgtcaaaaaaggaacggaatttctcgggttgggcatcgtgttccgcaatataaattcccagggaagtgacgtacagcatgaacaggatcacggagaagaacagaaaaaactcatcccggatcaggtaaaaagcctttttaaaactggcggcggtttcattaaaccgggccaacttgaaaatagccagtacgcgaacaatccgcagggaataaagaatctgccagtccgctccgaaaaacatgcccaggaacggaacgcagacaataaaatccagaatacccatgccgctgaaaatataagccttccgcggtttggcgcatagcacccgcaggatatactcaaacatgaagaaatagctgatccagtaattcaccttggccgcgatacggcctaccagaggatgaatatccggaatggcattcaacgtgtacagcatgaaccataccagaatcagtaccctgacaatgttctcccaggggccgaaattggcagcgcccagcttggtgcgggtaatctggggcatggcgggaatcaggaacgatgggcggccttccactcgtcagccttgaagccaacgcatatctttccattggtaataaaaatggggcgtttaaccagcatgccgttggaagccagcaaggctatctgctcatccaggctcatgccggcaagcttatctttcaacttcatgctcttgtaaagcaatccactggtattaaaaaatttcttggcgggcaatccgctcccttcaatccagctccgcagttcctctgccgtgggattctgttccacaatatgacgatcctcataagaaattccctgctcatcaagccacttctttgctttctggcaggtcgtgcatttgggatattcaataaataatgaagacatatccgcacgctagccccgtaaacacaccgggtcaagcgggcagcgcagccatcccgacgtcatgacttgattggaaggctgccgatgtatccgccgttgaacacaaaacctgagaacgaaagccccgaatgcatgcggataccgcagaaattctatattccggaacattaaagcaccatggcgcttcccaactgcgcgatggaaacgggattagcctgacgctcccggagcgccccggccagagcctgggtagccttctcctccccatgcaccagaatgatattcctcttgggtcccccggtcctgtcaaaatactccagcagttctccatggtccgcatggccggaaaaggaatccatctcccgtattctggcccggacaggatattgtttacccaggatgggaacctctttccacccatccataatcttgcggccaagtgtatgttccgcacaatagcctacaaaaagaaccgtatttttcggatcgccgatgttattcgccaggtggtgaagaatgcgccctgcttcacacattcctgaggcggaaataataatagcctgcccgttcattttattcaaagcctgggactcgcccacggaacggatcaaacgcagctgttcaaaacaaaacggatccttctcccggaacaggaaatcataaacctccttattgaaacactccggatgaatgcggaaaatctccgtcgcacccactgccatggggctgtccacatatacgggcagcaagggcagagttccttcatggtaggccctgttcagcagataaagcagctgctgggtgcgttccaccgcaaaagccggaatataaacgcggccgcctaattccagagcctccttgatagcccggcagaacgtctcatcatcacgggagggagcctcatggaaacggccgccgtaagtgctctccatcagcaaaatatccacatcgggaacagggacgggatcgcgcagtaattcgttatctccccgccccacatccccggaaaacaggaaacgcttcttccgcccgtcttccctgtcctcaatatccaggcacacttgcgcagcacccagaatatggcccgcatcataaaacgtgagtgtcacccccggaacaacgggaatgggccggtcatacccgatattcacgaactggcgcatgcaccgctccgcatcctgttcggaataagtaggataaacatccggctgatgaataccgcggcgcttgttcatcttattgatgaatgcgcagtcgtgctcctgaatgcgggcggcatccgccagcatgagctggcaaagatctctggttgcaaatgtactgtaaatatttccctgaaacccctgtttcactaaattgggaagattgccggaatgatcaatatgagcgtgggacagaactaccgcatccacctccgccggggaaaaataggggaaatccttattgatatgccatgcctcctcacgccgcccctgatacatgccgcaatccagaagaatccggcacccgttcacctccagcaaatgctgggatcccgtcgtcgttcccgctgcgccgcaaaaatgaattttcattaatacatgtgtacaacaagccagcgggcaacgcaagaaatcaatacctgaagcctttcattcaagataccctttgaaagacgggaaacatcagccgcaaaccccatgccttttcttttttccaggccataaaaagaaaaaagccaataaactgcaccattcctccttctgtacagtattcctgtgaacatgaaatttcacttctttcccgcccgggttgcggtttccgtaaaatgcatccgtcaaaaacttccccttcgcaaggcacatgctccatcacggatgcacgccggaatacccgcatccaggagaaccctccggtatcactgccaaaaaataaaacctgcaggttattctgaaaacattccgttctgattgcaacccgcctcctgaaaaaagcggccggccaaaagagtcccccctaatcttaataaagcctttcagctaaaatgaacaggacagaaaattcccgccctgttcataatgccgttaaattgcaaaaacttacttatcctccgttttggagtccgccgtcttctccacctccacgtcaatgggctgggaaagctcgggagaaggccggacctccgttttggaggtggaagcattactcatggtctccttctcggtcttcagcagttcttcttcaaattcagatttggccttcttgaattctcccaggctcttgcccagtccgcgggcaaattccggaagtttcttagcgccgaacaaaagaaaaacaatcaccagaatggcgataatctccggtgttcccagtccaaaaatagctaacatgttcatcatggagtactacagtatttttaacatatttttttcatgccggatacttcataatacgcttcatgcgtcatcagaggactgccgttcctgtttctgctgttccgcaagccttctggcggcaaaacgctgaaaacgccagacaataataaatattaccagcaaaaagatacctgatccgccccacaacagccaaaaagcggcggaagccgccttttcatctcccatttctccagcctggttccaataataataggataaaaccggattccagggcagtgaactgtccggcagaagatggagacgcgccatgcggttcatggccggcagataggcagcctgggcggatgctttcatcagggaatctccctgggcctcatcaccacgtgtataatatacctgggccagcatgtacatggccttgggatcccctgcagcatccgccacacgccgcagcagcctgtaggcttcatccgcatccagttccccgcccttcccgttctggagcagctccgcggcctttagtgccgcagggaaataaccgacggcggcagcctcacgatacagagccagggcccgggccgcctgttctgcggaaggagtgccctccagcagcatatccgccagggctgccatgctgtacgggtccttccattccgcccctttttcaaaccaatggaaggccttttcccggtcagggggcagatacttgccgtcccggaacattatgcccagttccatcacggctcccaaatctttacgggaggccgctttctcaaaccattccacggccttggccgcatcctgcggcactcccagcccatcccggtacttaaatgccagaaggccttgtgccgtcaggttgccgctttccgctgcctgaagaagatatgggactgacttttccggagaactgtccggaaccagctttcgttcataaacaagggcagcccataacgccgccttggcatcgccgtcatccgcctctttcttccacgtctggagagattttttataataaagggctgctgttgcttcatccttcggtcctcctgctccctgggaagccattacagccacctggtactgtgccgcagcattaccgctgtcagcagcccgggtaaaccagtaccgggccctttccaggttctttgggtacaggcggctgcctgtataaaacagcttgcccaaatccagcatggaatccacatctccgttattggcccttttctccgccagggaaacatactcggacatccatttggacgtttccgcagcattaccctccacgtcataatgcacagccagctcccgggcggcagctggatccccattcagagctctttcgcggagaccggacaagtaagcctcaaaatttccctccccggcaggctccggagaggaaatattctgagaagcaagaagtggatactgaacgagggacagtccccacaatccggcaaaaagccaccatctgtaatgtttcttcataccggaacaagtcattcattaatggcccctgtttccgcgggaaaaactgctggaggacctgcctccaaagcccggcttacgaaccccgccttcacgccgctgaaaacctcctccgcggcggtctctcccaaagccgccttcacggcgttggaaccctccttcacgacggttttccctgaaacctctctcctgatgctgaaaacctccttcgcggcggtctcttccaaaaccgccttcacggcgttggaatcctccttcacgacggttttccctgaaacctccctcctgatgctgaaaacctccttcgcggcggtctcttccaaaaccgccttcacggcgttggaaccctcctttacgtcgctcttctttgaaaccggcctcgcggcgcagggccccatccccgcggcggccgcggaagccatctccacgacgatgaaaatctccgcggcggtcacgggaacggaagccggaatctccccggaaatatccatcttccttgacttcacgttcatcctccgtctccacaaaacgagtcttcatttccggagtaggttcataagaatccccagcttcaaaatcttccggattaaacacataatcctcatcggaatcaacgcctcttccgccctgctcacccttggcgccccccccggcgacaagctgggaagcacctaggtatttacgctggcggggaggatttttcagtgacagagccacgtccgcatcatccaggaatttccagcccccgggttccaagtcccctccccacagggagccgatgcgcacgcgcaccaacttgcggacacgaaggcccaggcactggaacatttgacgcacctgacgcttcaacccctgttccaaaacaatgcaggcacggcgcgcggaagcgcggcaaacatatttggccttggcatttccctccggaatgcgtactccgcgcaaaaactgcatcagtacggaattatcaaaattctgatctaccgtcacccagtactccttttctatgccgccggtaggatgggaaagaacctgggtcaattcccccttattcgtcataatcagaagaccttcggaatcggcatccagccgtcccacataattcagatggcgcaggcgcggtggcagcaggtcgtaaacagtacctatggctccctgcgcttcgcggctgcacacatacccgcggggcttgttcaacagcaccacaacctcttccataggggtcatatggcggccgtccaccttcacgaaatccttctccgtcaccctcatcccaggcgtatcgataaccttcccgttcacttccacacgtccttctccaatcagcctgtcggccacccggcgggagtcaatgccgcaggaagccaggaatttattaatgcggatacctccgttttcttcggagccatgttgttcttcactcatattggtataatgtccgctatctcagcggatgattttgtattgtttatattacggcaattcacatcctcaaaaagaggagactttcttttgccggaagaaaaaagcctctcggttcatagacatccgagaggcttcctgtattaggaaaatgacttgccgtgcaaactccgccgggaaactctccggagaggataaagacaagcttaagcttcatgcttggtcttcggcaggccgagagggctttggcccttcttccattcgccgcgttccttcagaagcttgacacgttcaaaacgcttcaggacggaacgcttgccgcctacggtaccggttgctttgaggctggaatgcttggacatgatcttgtgtttgtaaaaggttcagaaaaatactttacaccacccttgcagtggcaggcgggattttataacggaaggttccgaacttggcaagagaaatttggcgcaatagccaaatatatcactctgtggcatcccccggatgcgattccagccacttcctccacaaatccggacggttcaggcgcgtacgctccagagacttcccgtgcttccatttttcaatggcggggtggttgccgcccagcaaaatctccggaacagccaggccccggaacacgttcggcttggtataggcgggagcctccagcaaaccgttggaaaaagattcctccacggaagaacgctcatcccccagcacgccgggaatcaggcgcgctacggcgtcaattaccaccacagaggcaatggccccgttcgtgagaatatagtccccgatggacaattccatatccaccagctcttctactacacgatggtccaccccctcataatgaccgcagaggataatgagatggcctccggaggcagccaattccgcggccaatgactggttgaacgtacggccctgaggagtcatcagcacaacgcgggtttcccgccggcgaagttcctctacggcggcaaagataggttccggcttcagcagcatgccctgcccccctccgcaaaggtaatcgtccgttttgcggtgcttgtccgtcgtccagtcacggatattatggcagcgtatctccaacaatcccctgtcacgggcctttcccagaatgctgccgccaagaggggcttccaccatatccgggaacagggacaaaacgtcaatcgtcagtttggcggccataagaaaaaaacatcagcgttcgcgcttatggccgcgcagcatggcctcaatgaacggatccaggttgccgtccatcacgtcctgaatattgccggactctactcctgtgcgcaaatctttcaccatttgataaggctgaaaaacataggaacggatctggttgccccacccgatgtctcccttctcactgtactggcggtcggcttccgcctgctttttgtcttcctcaatctggtatagcttggcacgcagcatattcatagcctcttccttgttacgaagctggctgcgctcattctggcaggccacgatcacaccggaaggaatatgcgtgatacgcacggcggtttccaccttgttcacgttctggccgcccttgccgccggaacggtaggtatccaccttcaaatccttgtccaggatttcaatattgatggaatcagaaacttccggcgtcgcgtccagggaagcgaaagaagtatgtctcttcccggcggaatcaaagggagaaatgcgcaccagccggtggatgccgcgttcattcttcaaatatccgtaggcatactctccatccaccttcaatgtcacggaacgaatgccggcgtcatccccgtccgtactctccaaatacgtcacggaaaatccccggcgctcacaccagcggatatacatgcgcaataacatggatgcccagtcacaggcttccgtgccgccggccccggcgtggatggttacataacaggaagcctggtcctgcggtccgttcagcagggtcagcaattcaaaatccgccagagacttctgccatctggcaaactcttccacagcctcccggcccaggtcatcgtcatccgcctcctgagccagctcaatagcagcatcaatatcctccagacgggacttcagcgcggaaaacgcctccatcctgtgtttcaggggattcacctccgccatcagcgcccgtgcggcattctggtcatcccagaaatccggggcgctcatgcgttcatccaattcggctactcgttgttgaatgccgtccaggtcaaagatagctcccgagctcggaaagacggctatgcaggacagccgtgtcgagcgccgagagatctgcagcgatatggggatccatgcgcgggaacctatcacgaattacctggacggaaaagggcaaaatgccgtttctccaagtcatcctcttttactccgactcgtaccgggacatttccgagaataataacactccgcacgctgaacaaaaccgctcctcttccgcaggaagaacatctaacaggaaatgaatatttccgaaaccaagcccacttccccatttcaatgccccatgggaaaaacagcagacaaaaatcttatttcattcccttaccttacatcatcgttttctgcccttccccctctttccggaatgtggctcggccatccatatcctcggcttcccataagagagcccggagccatgctacttggcggaattttcctctccaccctcaaaagggcggatccggcaggacctgagtttttcaatctcctcaaaagtcatgatgtgttctatctggcaagccacttcattggcgcgttcttccgggagggccaattcctcccgcaggaaatcaaacagaataccgtggctgacaataattttcccggcaattctgcggccttggggagtcagcttgacgggagcatactgcgtatactccaccagtcccatatccgccagctgcttgacggcagatgtaacggaaggcatctttaccttaagcatctctgcaatatccctcacctgggccgtcccgttcttttcagacagcaacccgatagcttccagataatcctcattgctcttggtcagctccaacatggtataaaatgaaagttaatactttagtggaaactaactcaagattttttccagacttctttggaatgagaaaaaaccgccgcgaatatgaccattcgcggcggttaaattaatcagcgtaatacgaaaacgggcttacttctcttcagaagggctccactcttcgttttcacgggtagccagattgaaggcgtgttccagacccaccatatcgctgctcgggcggagggcttcaaaggaagcggtttcgcggcggagctgttcggtgtcgtaattgacggccttgatggaaaggccgatacggcgttcgatgctgtccactttgatcacgcgggcagtgatttcatcacccaccttgatcacatccttcacgcgttccacatggtcttcgctcaactgggagatatgaatcaggccgtcaatatcgccgtccagattcacaaaggcgccgaagctggcaatcttggccacctggccagtcaccatatcgcccaccttgaagcggtcattgatggattcccacggatcggactcaagctgcttgataccaagggagacgcgctgatcctccttcttgatttccaaaacgatggcttccacttcgtcgcccttcttgagaacttcggagggatgattgatcttgcgggtccagctcatatcggacacgtggatcatgccgtcgatgccttcttccagtcccacaaaagcgccgtagggagtaaggttgcgaacctggcccttgatgacggtaccaatcgggaaacgggattcgatatccgcccagggattgtcttccaactggcggacaccgagggaaatcttctgttccttcacagaaatggaaagaaccacggcttcgatttcctggtccagcttcaatacatcgctcggacgggtgattctcttgacccaagacaactcggaaacgtgcaccaggccttccacgcccttttccaattccacaaaggcgccgtaaggcaggagcttggtcacgcggcccttgacatgggaattgatcgggtatttgcgttcgatatccgcccaggggttgtctgtcatctgcttcaggcccagggaaacgcgttccttttcgcgatccacttccagaatcacgacttccagggactgaccgatatggagcatttcgctcggatggttcacgcggccccagctcatatccgtgatatggagcaggccgtccatgccgcggaggtcgacaaaagcgccgaagtccgtgatattcttcacgataccttccaccttgtcgccttccttgacggtttcaaggaagcgctggcgctggtcggcgcgttcggcttcaatcacctcacggcgggaaaggacgatatttttacggtcgtcatttaccttgacgatcttgaattcgtaaacctttccaacatactcgttcaggtcgcgaggaggaataatatccacctgggaaccgggcaggaaagcttccacgccaacattgaccataagaccgcccttgacgacgctcttcactttacccttaaccaggccgccatcgcggtacacgcccacgatcttatcccagttctgcttatgggcggccttttccttggaaaggacgacgatgccttcgtcgttttcgaggcgttccaaaaggacttcaatttggtcccccacttcgatttcctcgtcttcaaactcggaaatggaaatagcgccttcggacttgtagccgatgtccaccaaaacgacttggggacggatttcctgaatggttccggtaacaatggaaccttcacgcaattcgcggaacttgctgtcaataagttccgccagttcagttgtgctcatttaaatggttgatgagttagtattaacgatctttctcatggccccttattgaccggcgggcaatcggggcgccttcccccgccgggcgaaaaatcggttgctttcaatatcagtttcacacaagaactcaaggcttttcttgaaaaactcctcccgattttttacggaacctgcggagcccctctggacggcggcagaaaacgagcgcacaaaaaccttgtagcacttccgtcccatgttaaattccggctaatgggaaaatgcaggaatacctgcatctatcagccactcctgccgcaaaaccatgaaaaaaaacctcctttacctgctcgcagcggggctgtccggaacagccttccttcacgccgcggataccgtcaaactggaccagccggacctggaacggggagctccgatcatgaaagccctgtccgaccgtcaatccattcggagcttttctgaaaaagcgctatcccaaaaagatttatcagacctgctctgggcggccaatggcatcaaccgtcaggaatccggcaaacgtacagccccgtccgccatgaaccgccaggacgttaaaatttatatatgcactaaaaacgcctcctacctctatgaccacaaggcccacgccatgattcccgtaaacgatggggacgtgcgcccggcggatgcccccatatgtctcattcttgtaacggatacggcggaaccctgggctgccatggacgccggcattgtctcccagaacatctccctgttctgctccgggacgggactggctacctatccgcgtgccagcatgaacaaggatgccctggcaaaggccctgaaactaacctctctccaaacacccatgctctgtcatccggtaggatataaaaaataactacttccggctacattctccggacagtccggaaaagaaaccatcagaaatggaaatgaattccacaacaggcggaattatggttccggcagaatatccatgtagatgccgggagagctcccttcaataggcatcgcgcccacagcccgggcataaaaatcagccggaccaaccccgccgatgacaccgtatgcataccccagctcccgcaaacctttcagggcggaaatcaatagcacggtgcccaatccgcttctgcgcacctcttccgccacccccatggggcccaaaaaaccgcgagccgttacatcgtaacaggcaaaaccaagaatcttcttctcccgtgtggcaatataacaggaaatgggctggcggccaaacgcgactttcgcctcacttacccacttgggagaaaaattccggccaacccagtcagctaccaaatgacgttcgtaagcacccggacggcgaatcaaaaaaccttccctctccagcctcctcaggtcttcttcaatatcgggcaaatcatacagccgcaccagcatatccatcataaccccggcaccgtatcacaactaagtgccgtggcgaataaaaaaaactggacaaacccatctttcaaccttagacttcgccgcaccacaaacaacgagctgtagcgcaggctggtagcgcgcttcgttcgggacgaagaggtcgcaggttcgaatcctgtcagctcgaccaatttccaagccgcctccgggcggctttttgattacttatttactgatataaaacaattttactcattaataactctgcacttcccctattttgcgccaaggcaaataaacagcatcatgctgattgaatttaccctcctcacaggaacaaaatcaaacgggcaaatcttctcaattaagcctggaggatgtcgggggtatttaccgatgcagaggaaaaattatctatgcccaattctcacccctatgccaggcagcatcacagccgctgcggaagtactctataacatcccccctaaacacaggagaatgaacctcctccacaaaaaagccccgttcatatttcatgaacggggatgagtcaaatgaagtcgaatcagggagaaaaaaccgggttacttgccggattccggtttaaagcgggctgcttccgattcggcggtgatttttgcaggctcgatatgcaggagctttttcatggcacggcccgggtcgctctccgtcatcggaaaatatctgacgtgatcgcccaggctgtaggaatccagtccataaatgctgtcagccggagtaaaatcttccggtgtgttcagcagtttttttacctcctttgaagacgcaaggacataactcagattacaactggaatacaattccgttttaggaaagcttcccttgggaagcttattggcgtgcccattccacttgaccagagcttctacaggaatatctccccgcagcgactgaacgacgcgggcatagtgcgtcgttccctggtcagtggagactattttgtaaatgataacagacaggaccacatcgcttttttctaaatttcgggctgtacccctgagaaaactatcctgttctacttcggcctgcgtagcaacatgggaagaacggtctggctttccaagggctacggttgaaagtaaccctgaaaacagaacgcaaagaaaagaaacatacttcatatgtatatattagatactgattttttggtttatattcaataaaaatagggcgaacacaaaaaatgtccaccctatgaatatattatttaatatcagttattaatcatccagtgtcgatctttggagcagccacacggggccggaaataaaactgcccacgccaatgttatttcccggacacattcccacatgcagactatcgccaaatacgataatatctccagcctggggagtgttgtacccattttctccatcatccggataatcaggagtccccagcagggtacggagataaaccgccatttgagctgcgctgatgataatgtgctttttacccccaacgccagggaattaccttttgccccaatattattggctcccggagctccattaaggtcaataccataactactaagagcaatgctcagacgcaaggcgcaattgttaatgtaattggcatctcccgaaacgtagctatcgttcagccatcctccaatatagttccacacatcatctgtagtcatggtgggataatccactacattatagcatcccagtaaacgttgtgcattggcaatattccaaagattttttggagcatcaatttcccaaagttccagttcggaatttcccatcttgggaacaaactcctccgcattggggtaaggagcaatttcttccggtacggcaaggttctcatgatgcagtttcgcatagtggaagccctttttaagttccttgcttccagaaacggatgtggacgaatgtgagccagtcaattccgctaccttttcaccattgatttccagatagccgttgtcgtcaatctgaatcgtgaaattataggttccatcttccggaacgcggatatatccttcccagtcatgtaccccggtttcttccgtcttgtgccatccaatcttggaggactctttcttcgttaccttgtagcggcggttgtttcccacatccaacgggtggaacggttttgtagatatatagccataatgttatgtttcgtatcgtttactactgaataaactgaatattcagttcatggaaaccttgaaagatttctcgctccccatcaacacgtttaacgcgtaatccaaccctcattcggaacgtgaaggaaaaggttaaaacggcacgacaatcaagcggaaaacaaaggatttgaaaagggcacaagaaacgaaatcattgattatcaatagttatatttcaaattttcttcattcggaacgaagagaccgctggttcgaatcctatcctttcgattattttctaacaacctcttccggacggttattttccggtaaaatcacttccctttcaaaagccagtcagaaacccactagcagctgattcttctatctgaaaaaagcccctgctgggatactttatcagtcatccgtcaaattcccattgccccgcgcatgtttctttctctaaaatgcaggtaatgagtgaatacttcctgaaacttcccggcgattcccagccgagagcctattccgaatacgaagtccgtgaatttctgggacagggcgtgatcgactccaaaacgcttacctggaaacagggcatggaaggatggcagcccgtagcccaagttcttccgccaatgtcacctatatggagggaaacacaagatcaagagagcaaagatcaaccagaggagcagcagtaccgcttgcgttatcctttaaacgggctagccaaattatccattttggcatgtttcgtattgctgcccttcatgctctggagcagctggattgttttttccaacaatgtcgttaattatgaagaaattcagacactcattcagcagaatatggttcacctgccatcttttgcggcgccattggtcttcctcctcagtatcctgttcattccatccctgcttatccagctgatctggctgtaccgggcatctgccaatattcaggaatttcaagttcagggaattcggttcactccattccttagcgttcttctaagctgtatgccggtagtcggcatggtgctcaatgccctggttcttcaggaaatatataaggcatctaaaaacccggcagaatggatgctgcaaataccctcccgttccctgcgattatatcttctggtgactacggctctaactctgtgcacccttttccctttcggggcggaacattacgtgacggcctttctgctcaccggcgcactgatgacggcagccagcatcctgtggctggtctgtgtcctgcaaatcaccagaaaacaggaggagctggtctccaaaaatcaaaactcctgttcctgatcgaaaaaaccgtaatcaacgtttttccttttcttccgaggccggctgactgcctgggaggattttatccaaagcttccatgctgttatccttatacagattctccagcagtttttcccaccccgccgccatctgaacctgtttcaaggcaataataggatcaggcatcatcatttccgggtcgggagcatattgctttagcacctcatccggattgatcctgttaaacgttgtcttcccatagcccggcattcccgcctcatgagcgatggattcaatcatctcaaaatgcaaatgcgccaaatagttgccgtgcgcagttccgactgagccgatttgctctccgcgtcccaccagagtccccagcggaatatcgctgacggttttcaaatgggcatacagactctgtacaaaacgcccgtccggcaagcggtgcagcagcacgacaacatttccccaatctgaagaaggctctcctgcataaatcagcaatccgcggccggcggcccgcacgggcagtccctcatccgtattttctcctcctattccatttaaatcctgtcctgcatgccttcccttacgggcggcattcatatcccccacaccctgggcaacataggtaaacgctccattttcatctccgaggggcgatgtaaacacatcggccagaggcgcctttgccagttcctggggtgtcaacaaaaccatccggtaatctacaggaaccggagcagaccgcggaatatcttcgtcataaatattatggggcatcccggcctccgggacggcggcatatttcgtcttgtaccaggcaaatgccgtaatcaagacacaggccgttcccaaaagccccataatgacgcgggatgtcgtcttatctatcatcgtgccgactctatacccacggaaccggatttacaatcacaagatagtcaggccagcgtctgcggaaatttttccatccacaatttgcgcgccgcacggatatcttctgaggaaacacggctggagagctcccatacgagcggaactccatgcggaaaaaaaggaagaaggcgttcaaagggaactactcctcccagcaggggaacctgatgatcccgcgcgggccatttgacgtcgttcacatgtcctccaatcaaatgggaggacattcggcgaagaaactgctcatgatttaatataagcaaattatgctttctttgaatatgcccgaaatcatgccagtaaccaataaagggattgtctccaaactccttcatcaacaaattcatttcatcctcactcggcacctgctcataatggctgcgcccttcaatgcccagcttgacgccaaattgtccggcttgcggaaggagctgccggagagcttcacgcgcccgttccagataaacgggagccaggcggttgcggcggcgtacaaattcgcccttggcgtcggcaaacgattccgttcccaccattccctgacgcgccaggttttgcaaacgagccgtatccgtgcgtttcgccaagggttccaccgttcccatatgcaacacgatatatccggcccccagtgctgcgccctgttcaatagactttttcgtcaattcaatagccttggaacgcacctgcagcaaatccgccgtaaaaggcctgctgtctggagaatcccccacttcgtcaatcggagcgggaaaaaaattatgcaccccggccacctgcacctttccggcttttaccgccctcatgataccggggagaagggataacttgatgccgtgggaaagttccacatggtcaaaacccaaagaaagaatctcatcaatcatttcttccccgtcctgatgacggtgggaattccagcacgtagaaaataccagcataaaaaaatcaattgttatgagctgatggagccgggttccgtgtagcaatcttccatccactccttgacagcggcagtcatgcttccagcgacatccgcacgaggtttgacgaaagccggaataaaccacggaaatgcgcccaccagatcatgaatcaccacaacatcgccatcacatgtatgggagccggacccaatacccaacgtgggaatggaagaatgtacggtaacttgtcgggccgcatgaggcgttacgccctccacaaccacagcacaagcccccgcctctgccacagcctccacatcccttaccaaggcttcctcctccgcggaggatttccctttgatcttatatcctccctcctccagcactttctgcggcaggaggccgatatgacccactacgggaataccggcctccacaatagcacggatatttcctgcctgggctgcccccccttccagcttgacagcatccgctccagccaaaaacaatttctttgcggattgcacggcctgttccaccgtatcataagaatgtatgggcatatctcccaccagcagggcgttcttcactccgcgcgcagtagcttccacatgatgaagcatatgatccagcgtcacatgagtggtatccggaaagcccaaaaccaccatccccaaggaatcccctaccagcacaatatctacgccggcctcatccaaaagacggcctgtaggatagtcataagcagtaaccagagtcacatgccgcctgttcttgcaggcgcggattcgttccgctttctcaaaagattgattcatggcgttcaataaacatgcaaatttaccagcgttccgataccaggagcggatcagcctcatccgtatccaattccgccaacaggcaggcaaccgttttatgctggcgcggcaggataagctccggcctgatatcggaaagaggttttaaaacaaatttcctcaaatgggctctgggatgggggagaatcagacgaggaggatcattgaccaccatgtcccccacatagataatatccacatccgccgtgcggggttcacagcgaatcccggaacgaatacgccccagaacccgttctataccctggcaatgcacaagcaattcctccaccgtacctggccaggtaaattccaccacggcattcaaataatcatccgcaccgtgcggacatccctgaggactggtggcatacagggaggattgcaaaaaagggtcatcagacaggctcatctgcaacaaatgatccctggcctgaaccatcaggctgtttttatccccaagattggaccccagtgcaatgcctgctctcttcatcagcaaaaaacatcgtggccgttccggaaaagaagaacggccacgatgccgaaaaagttataattgggacaaccccagaacgtcttccatggtatacagacccggttccctgccttggagccagagagccgcacgaactgctccggaggcaaatgtcatacggctggacgccttatgggtaagttccagccgttcaccatcggaagcaaatattacagtatggtcccccaccacatcccctccccgcagggaatgcatgcctatttccttggcgggtcgaggccctaccaacccttcacggccaaaaaccacactatcttcataattcctgtcaatggcgccggacaggatttccgccagtgtccgggcagtaccggaaggagcatcaattttgtgacggtgatgcatctccattacctctatatcgcagctgcctcccagaatctgagcagccttgcgcgtcagccagaacagggcgttcacccctacggaataattggaagcgaacacaatcggaatggatgccgcagcgtccacgatctcctggcgttccagctccgtatgccccgtagtgccaatcaccagaggtttgttattggcaacagcttccgccagcagagtgctggtgaaagcgtgatgggaaaaatcaatggctacgtcgcatttggcgagggctggataaagctcctgtccctgatcatgagtagaacccacgcaagtatccggattctgcgtcaccgcctcttgaatagcctggcccatgcggcccgaaatgcctgtaacaagaatggaaatcatatcactaaaatgttaaagaatattgaaacgctgaagaagagcggaaagctgagcttccttctcttccgccaatggaaccagcggaagacgtatgccgggctgtatatctcccctcatcgccaaagccgccttgatcggaacaggattggaatccagagtcattagccctttcatcaacggataaaatgtcttctggagggaaagcatttcccccatatcctgattcaggccagctttgacaatggaattcatgatgcccggaaccagattggatgttacggaaaccaatccgctggcgccacaggccataaaaggcaccgtcaggccgtcatcgccacacagaacagtgaaattttccggaaccacctgcatcagctggttcacgcggtccacattgccgccggcctctttcacacaaacaatatgcgggcaatccttcgccagacggctgattgtttccacactgatttcaatcccgcaacgccccggaatgctgtacagcatcatcggcagacgggtagcgtccgcaatagccttgaaatgggcatagactccatcctgagaaggtttattgtaataggggcacacctggagcgttccgtctactcccatcttttccgcttcctgggtcatatggatagcttctgcggtggaattagcacccgttcccgcaataacctgaatacggccagccgcgctctccacggccaattctattaccctcaagtgttcttttacagtcaaggtgggggattctcccgtggtaccgacagccacaatgccggccacgccggcagctatctgcgcttccacaagcattctaaaagcctcttcatcgacccggttgccggcaaacggagtcacaattgctgtataaagaccttgaaacttcataaccttacttggaaatatactatcttaacagacactttttgtcacgacagaatacagaaatatggcacgcctgtcaggcatcctgaaataccattcgtgaacaaatggagcaaaactccaggcaggaattaaacagggacaggaatgattccggccgcctgccgggccgccaggcagctttccttccattgaccacgatatattcccggtgaatatggcgaccttcgttcccacataaaaacaacgcagccgcacaggcggaagaagccaatcgagactgggaaacataccgaaataccggacggtgaattacgatctggctcattctgacatctctccggttcaggcaattttccaagcccgcggtatcttcctcccatactcccttttttccagaacgggaaaccatattcacaatcatggccccagaaacaaaggcatgttccagcaaaacggacagacggacacgggaagaacaactcagcccctgcacctcgactgaggcatcttcacaaataatcaaataatcaacacggccataaagagtatgtaccagaccagcaaaagaagccaaatcggaagaatggttcaggcggcctgacatgaccaggtggctgctgcccggaagacaatcaacgatatggcaagattcttcaccggcctcatgaagcatggcaaccacagttccctgacaggcaaatgccttggctgccaaatatcctatattgtcggcgttgcccagaatgacgaccacaggtttctgaatgacttgggatttcatatgccgccattctgacgaaagagtgtaatccgtcaataccccacacatacttaagtcattaagaaagaaaaaggaatagttaagaaaaaattatatggtcacgatattttacaagggctggaattttattcatcgtagagactgagcaagagatttaaaggggaaaataggaaaatgcaagaaaagaacaggccccgcgagtcgagggactggcggggcctgatggaaaaaaatcccggcggcgacctactcttgcgggacctatcgtccgactaccattggcgcggcagcgtttcacttccgggttcggaacgggaccgggtgggaccactgcgctctggccaccgggcttcagggggaagaggttttattgtatcttcatcctgcctgcccgggagcccagcattggggctttcgagtgtgagattttttaattgggttgtatgaggctaagaagatttctgggggggggatattcagcgtaaactgacatctgcgtggctggtggttgagatcatgcattaacagaatgagacaagagcaagtgttcattcacgacggggagtgatgtaatatgatgaagtcaattggtaattagtatcgctcggctcaatacattgctgcacttacacctgcgacctatcaacgtggtggtcttccacgaacctgtagggaaaactcatcttgggaagggcttggcgcttagatgctttcagcgcttatcccgtccgcacttagctactcggccatgcacttgacagtacaaccgatgcaccagtggtgcgtcagacccggtcctctcgtactaaggtctgaacccctcaattttccaacgcccacagaggatagaggaccgaactgtctcgcgacgttctgaacccagctcgcgtgccgctttaaccggcgaacagccggacccttgggaccttctccagccccaggatgcgacgagccgacatcgaggtgccaaaccacgccgtcgatatgaactcttgggcgtgatcagcctgttatccctaaggtaccttttatccgttgagcgacggcaattccactttctaccgccggatcacttgggcctgctttcgcatctgctcgacttgttggtctcacagttaggcgggcttatgcccatgcactcgacacccggttgccaaccgggctgagcccaccttcgcgctcctccgttactctttgggaggataccgccccagtaaaactgaccggctgacacggtcctctggccggattcacggctcagggttagatcctccagtttcaaagggtggtgtctcattgatgactcggacgccccctaaagggcgtcttcagcgtctcccacttactctgagcattaaaaccgaagaaacaatgacagcttacagttaaggtctatagggtctttccgtccttctgcgggtaggcggcatcttcaccgccactacaatttcactgagcgcctggttgagacagtgcccaactcgtttcacgattcgtgcaggtcggaacttacccgacaaggaatttcgctaccttaggaccgttatagttacggccgacattcaccgggacttgggtttagagcttcgccttgcggctaaccccttgccttaatctttcggcattggtcacgtgtcacaccctatacttcgacttgcgtctttgcagagtgctgtgtttttgataaacagtcggttgggccatttctctgcggcctgcatcgctgcaggcaccccttcttccgaagttacggggctaatttgccgagttccttaaccaggtttcactcttacgccttggtatattctacccacccacctgtgtcggtttgcggtacgggtcgcttagcatacgctggggcttttcttggcactcgatccaatgatgcgctgagtccgtggactcaactcggaattcaataacctagtcatcttttctcatgcgtccccccagtttaagggttgcgagctcaggattattaacctgatgtccatcgcctacgcctctcggcctcggcttaggtcccggctaacccagggacgaaacacgttgccctggaaacctcgggtttacggcggccggggatttcacccggcttaacgttactcatgtctgcatactcacttgcatgtgctccagggtcagtcgccatcgcccttcgacgcgcatgcaacgctcttctaccactctgccttgcggcaaagtccagagcttcggtataacgcttgatcgccaatcattttcggcgcaggatcactcgatgagtaagctattacgcattttttaaatggtggctgcttctaagccaacatcctcactgtctgtgtaatcccacatcctttccactgagcgttatttaggcaccttagctgctggtctgggttgtttccctctcgacaatgaagcttatcccccactgtctcactgccacgttccattgcacggtattcggagtttgataaggtttggtaagcgggtgtgccccctagccttgtcagtgctctacccccgcgcatcagcacgtgacgctgcacctaaatgcatttcgaagagaaccagctatcacggggtttgattagcctttcactcctaccctcagctcatcagagaacttttcaacgttcacctgttcggtcctccacatggttttacccatgcttcaacctggccaagggtaggtcacctccgcttcgggtccagtacctgcgacttattgcgccctgttcggacttgctttcgctgcgactccgggccggaagcccttagtcttgccacaaacactgactcgcagactcattaaacaaaaggcacgccatcgcagattgctctgctctgacactttgtagacatacggtttcaggttctatttcactccgctcacagcggttcttttcacctttccctcgcggtacttgttcactatcggtcgccaactagtatttagccttgcgcggtggtccgcgcgggttcatacatcgttccacgtgtgatgtattactcaggataccactaattcccactctggatttcgtctacagggctttcaccttctccggccagcctttccaggctgttctactatccagtatggtcgaatatgacgtggtcctacaaccccgaaggaataccttcggtttgggctccatccgctttcgctcgccactacttacggaatcgatttctctttcttttcctccgcttactgagatgtttcacttcagcgggtttcgcgtttcataccctatgtattcaggtatgaacgatcgagtattgcctcgatcaggttaccccattcggatatccccggatcatcgcttgcttgcagcttcccgaggcttttcgcagcttgccgcgtccttcttcgcctgttggcaccaaggcattcaccgtacgcccttacttacttcatcatattgcaaaagctgttaccacttccacaataccacaaagccctttcgtgacttactgtattgtctcattgcttggtatgcatgtttatcttgtgttttgtagttgttgttcaactacccactttgttggaaagcgattgcttctcagcaatcgttttctttgccacgcagatgtcaattttcgctttccctcaataatcgattttgctggtgggcctgacaggacttgaacctgtgaccccgcgcttatcaagcgcgtgctctaaccaactgagctacaggcccggctttgggtctctttcccgaaactggtggaggcacggggactcgaaccccggacatccagcttgcaaagctggcgctctaccaactgagctatacccccagttgcggttctcggtgaaaaaaggtcgtcacgcacgtcgtgccgggcttcgctccaggcgaccggctgtttacacatctttggttcgttgcgggccctcgcgggttccgctttctctcccctcgggaagagatccgacctgtgcacttccgtgcacttgctccatagaaaggaggtgatccagccgcaggttcccctacggctaccttgttacgacttcatcccagttaccagtctcaccttaggaccctgcctccttgcggttggcttcagatacttcgggtgcgaccggcttccatgatgtgacgggcggtgtgtacaagacccgggaacgtattcacggcgccgtagctgatgcgccattactagcgattccggcttcgtgtaggcgggttgcagcctacagtccgaactgggcccagttttcaggatttcctccgcctcgcggcttcggccccctctgtactgggcattgtagtacgtgtgcagccctgggcataagggccatactgacctgacgtcgtccccaccttcctcccagttgatctgggcagtctcgccagagtccccaccttcacgtgctggtaactggcaacaggggttgcgctcgttgctggacttaaccaaacatctcacgacacgagctgacgacggccatgcagcacctgtgtaacgcctccgaagagtcgcatgctttcacatgttgttcattacatgtcaagcccaggtaaggttcttcgcgttgcatcgaattaagccacatactccaccgcttgtgcgggtccccgtcaatttctttgagttttaatcttgcgaccgtactccccaggcggcacgcttaacgcgttagctccggcacgcagggggtcgattccccgcacaccaagcgtgcaccgtttactgccaggactacaggggtatctaatccctttcgctcccctggccttcgtgcctcagcgtcagttaatgtccaggaacccgccttcgccacgagtgttcctctcgatatctacgcatttcactgctacaccgagaattccggttccccctccattactctagtctcgcagtatcatgtgccgtccgcgggttgagcccgcgcctttcacacacgacttacgaaacagcctacgcacgctttacgcccagtgattccgaacaacgcttgagacctctgtattaccgcggctgctggcacagagttagccgtctcttcctcttgtggtactatctttttaatttgctcccacatgacaggggtttacaatccgaagaccttcattcccccacgcggcgtcgcaccatcagggtttcccccattgtgaatgattctcgactgctgccacccgtaggtgtctggaccgtgtctcagttccagtgtggccggacatcctctcagaccggctacccgtcatcgccttggtgagccgttacctcaccaactaactaataggccgcgagcccatccccaagcgcattgctgctttaatctttcgatactatgcggtattaatcccagtttcccagggctatcccgctctcgggggcaggttactcacgtgttactcacccgtgcgccactagagaattattagcaagctagcaattctctcgttcgacttgcatgtcttatccacgccgccagcgttcgttctgagccagaatcaaactctccatcaaattaatttttgaaattgctggaccaaatggaatcttgcgatttcatttgcgccatgcttcagccagctcttccttcaagttgtgtctcttgaagacctcttcgctctgcctcgcacggcgcgcgtcacgaccttttttctttccccttgcttctaccaaaccgcacctctcagagccaggtcgctccttcgggccttgtcccctcgctcacctctcggctcactcggaaaaccctcggcggtttttggtagtcattcccttgaaatcttcttatcgcacccctttccggggctctttccgggtggccggctccagccgcttccagtactcttccgagcccttcagccgccgggcttttcatcccgtcgccgtgttggcgtgccgagaaatctaccataccacacctttttgtcaatttttttcgagacgttttttcgacttgttgagcccaaaatcgaaacatatctgattatcaacgcattgcatttttattttttttaataaaaaagcctctttcaccacgaaagaggcctagacgtttcagaagtcctaagtttctctctactttttacctcctccactctttttcttcatgactgcgtattgatgaaccagaggcagttcccggagggcgtttacagcatccttccttgcctgggcgtaatcttttttctccattgccatattcatcatcacttcatagcaagcggcattgtatccgccatcatccctcgtattagaatccctcataatctggagagcgcgccgagccgccttatagctgtatttacgcatttcctccgacccgttaaggattttcaggatataggaagcaagtgaatcttcccgggggaaacgctccaagacgaggtcaaagatatcaaccattttccgataatttttctccttccaagccttttccgcccgcacttccgccacagtagacgcaaaccatccgttatcggaaaactgccctgcattttcctcaatcaacttctggtattcatcaaatttcttttcccgcctcaattcaaaggatttttttatgacagcatacatggcctgctggcgggccttccgtttcgcatcttcttccgcaaatctgtttttgtcaaaagagtccaatctggcagtttccgccacccattcgggcatcttcttaatttctccagcccacagcaatgttccgtcacgaacgacgaccgcggcgggaaatgagtcaagtttgagcaaatcacaaaattcaatgaccgaacgatccgatggaataccgacaggataaggagtccatccttccggcccggataaatagtcccgcatctgtttttcccccgacggattgagccccaataccacggcttttactcccggatggtctaaaagcccgtgttttttaagaacggcatcaagagctcttccaggggctgtttctccaagtatattattgtggcctctccagaagctgatgaatacagttttgccgacaggaagtcctgttagaccgggatgattgaaccattttaatttgctgaacaggggagtgtactgtttgtcttcctgcactactcccatttcctgcatcttcctcggaggttccggctttatttcagtaacttcctgatttacaagattctgaaaggattccttattacctgaaagctgctgcaacttcgtccaggctttgctgatggacgttaaggaaagcgccttttccatatccagcaacgcttcttccatgtttccctgccgttccctaagttccgccatcagtttccatggcaaggaagcttccttgttattccttttggagatttcaatacaacggttcaggcttctttccaccagggcggcatccatttttccggcaggcacggattttccatttaaaagcgttcccgccacatcaatctgtacacggtaattgtccggatactctttgcacagatcatccagtacggcctgtgcttcctggaatttttccaattccgccaagacgctgaatggaaccattttcagttgaatgatctgatcctgctgaaactgtcccgaatcctgaatttgccttaaaaaggcctgcgcttccccctttcctcccttccgggcaagttctcccgttctctcagaaacctggcggtagagcttccatgcacgggcgtttgcgccgggattatcccccggaagagaggctgcagaaaaatcaggcttcaacatggcccgcatcatttcttcagaaagttttccaggatgccctctccaaataagcttgccgtttttaacggcaaaagcatgggggatgccgttaacccccattggagacagccatttatccctggtctttttcccatccacatccacggccatggcataagtaaggggcgatggacggttttttaaaaattctttcagagattccggagatttcctgtccatgacgttaactccaataacctgcatatgaggattattcttaaatgcctgatgcaattgttccatatggggcatagctgccaggcacgggccacaccaggtagcccaaaattcaaagatgtacactttgtccttttcccattcctttaccggagttccctgtatccatacatccggcaaaccatccagaccaagtgatggaagggcatcctccgaagcaaccgttttgttttcctttttctcagaagaagctgcgtgcaatggcattccggcagacaccgcaaaaatcatggaacatcctaaaaccaatagagaggaatttaacatggtaacacggtactaccgtaaccttctgcgtcaagccaatagaaaaaggaaaggaaagatagaagagccgttatcgtgttctttccaccagaatggaatacaaaacattcccaaaaagaaaagatattaaccatggagtttttcatatggaataagaaaacaaacacgcccggcatctacattttttgattttcattggatttaggaaaaatgatttacctttttggatacacaaagacaatattattttctaaaatagaaaatatgccagaaatggcttgccagatttttctgaatgcgaaaaatgcgctcatggatgaaatgaagtccagtatcagaaagtttctcgctcttacgaaaatgacccgggacgaatttgccgacctttgcggcgtcagcaaaagtcaggtcgataaatggctttccactgttccaattccccgtgccagacaacgccttatcatcagaatcatgaaggaagagtacgccaaacaggcacgcctggctcaaacaaaaaatccgaatagtattcacgttcccgttactcctcaaaagtatgaaaagttcaggaatgaagctgaacgccatggcctgaccgttccggaatgggcgagtgaagcactggatgctctttccagcatcaaaagcagaagctgaaaagaggatccgatattccggatcgattccagagaaagagaaaatagtgctgttatcgcctcttccctatcttttctttcattacaaatctgcacaaattcatgtctgacgacgatatacgcattctggtgaaggagtggctgcaaagccaaaaccgcaaatcctatcaattggcggaggagataggcatccggccgcaaactttttacgcacagatgagcgttcgtaaaatatcggccaataccaaaaaagcgctttcccgcatcattccaggcctgattcccgattcagatctgaatccaccttccaatacggaagaatgtgacccgaaaaaactcagaatcaaggaatggctccgggctcacggcaaaacacgccgatggcttgcggaacaatgccgcgtttccgtccgcaccgtacatacctggtttactgcacgcggtaacattcccgtcacccaatatctctttatcgataagctgatgaatgaaggcgagtcgtggaaagttcagcttcccaataccattcccgtgaattttccggaaacggaaatggaaattgttcataagttccaagaactacatccggacatagatcttcccatgtacggcatgcataaaatcctggagttatgcgttaatgtactcactcaggatgaatattcaaaggcgtctccatacttccgtattaccaaaaccggagagatttgccaccgccggataaaataagaattattcaaaagttcaaattttcttttccacgggagaatttctgaaaatgcactgtttgcatacccatgccggtatttttctaaaacatcgcaggttctcctccagcctggccttccgggcctttcttcttaatctttcacggaatcctttcatttttttgttccttttatcacgacggccacagacttatcctatctctcaacacagagaaaaaaatcttcagccacattactccatccctccagtttcgaaaatcaatcactattgattggcaaaacaggccgaaccatgcttaatagtgcttctatgcagcctgttcaccagagttaaccatacttaccttgcctctccatttttaagaaagccgccttttggtgaaaaagcttttatcgcatgaaaaaccccgtattcttaaaaagaatacggggttaaaaaatggcacgtccaactggattcgaaccagtgacccactgcttagaaggcagttgctctatccaactgagctatggacgcatgatgcggcaaaagagtaacagagttcatctcaacttggcaagcccggatctttgaaaagcgcactttaagtgccggaacagcggttatgcgtaaaaggaatgtccgccagggtcgctccaaacttccgcaccagaggctcctgacaggaaaacatgcgctcccgttcctccggttccgtatctatatatccgtgcagatgcagaagaccatgcaccatgtaccggaaaagttctctgaaaacaggttctccgaattccgaagcctgccggatagcggtatcaaagctgacgatgatctctcctattccgtctccatgcggaaaagtaatgacatccgtcgccgtcgggtcattcaaaaaacgggcatgcacatcccggatgacgtcatcggaaaccacgctgatttctacttcatccaatccggaaagtacgggaacagggccttcaggcaacgccaacatagagggaaggcaactttccaaggcgccaatcaggacatccgtaacggatgaattgagcctcccctcctccagatgattgtagagttcaagattcggtttcatttttctccgtaaccgcgccgttctccatctccgcttccgtggattttccctcttgaaggattccggcatcgggcaactccatgatttcaggaacgtctttgccctcactttcctttttcaccgctttctcttcctgttccctgacggacacatcaggaagaacatttttttcaatctttgcctccggattgtgggaaggataggcaatgcggttgtggtggatgcttttcagcgtcttaatgaaactgttgcggatcttcttgagatctccgaaggtaaggccgcaatcgtccaaatggccgtccaccacccgttgcttcaaaagttcatccacccttttctgcatttcctcacaggaaattttacccatggagcgcgtggcgctttccacgatgtccgccaggctgacgattcctgtttccttgctctgcggattgggccccttgtaacggaagttggattccaccacttccggaacgtcatccggagaagccaggccgctttccacgcggctcaggatctcgtcccggtattgaagggctttccggtaaaagaagtaagccagtgaggtgccgtgatgctgctctatgacgtccaccaaaggacgcggaaggttgttctccctggccaatgccaccccgtcctgaacgtggtcgatgatgatacgggcgctcatgctgggcgtcagctcatcatggggattgggaccatccatgatattttcaataaaataaaggggattttgcattttgccaatgtcatggtaataagcctccacccggcattcaatgggattggccccaatggcttccgccgctgcctccgccagctgggcaaccatcagacaatgatgaaaagttcccggagcttccatttgcagccttttcatgagagggcggttcatatccgccatttccagccaggaaataggcgtaatgattttaaaagctccttctatgataggcaggacgccgctgatcagcacgctggtcagcatgcttacgccaaaagccacggccaggcaaaccagaactccagtgaggttgtaatcccatgcctggagattgatgacccccatgatgcaacacagtaccatgacaagcagccccacaaagaatcccgcccgcagcaactgggcgcgattccgcaggttatgggtaagcaacacggtaagcatgccggagagagagctcagaatccagaactggacctgcttttccggagcatattgctccggcagaatgaaaaatccgccaagcatgcagatggaaatagtggcaaacatgcccagaagaggccccagcagcaccgtgacaatcaacggagccatcatatagggaatgtacaaaagctcattgcctatgtcggaagtaatgtcagccgttacatgccggatgaagccaaaaaacaggagctgaaccagaaccgccccccatgtgacgacaaaggttttgttttttctgcgcagggaaccggcgcataaccagtacataggcatcagcgccagcgtcacggaaaaaagcagaaaagcttccgacacgtgatgccatatggattttccccaatgggggctgtaactgcccatccattgaagcacgatgaaaaccagcacgcacaacccgacggataccgccaggctggagtccaaacgatcaccggctgaacgggacacggaggcagccccttccgggggagctccttcttttgccgcggcggcggcatgctttttcagaaactgaaacatgatgattatttggggtacacttcggcaacctccggaatagtgcccagccgggccatctcctcttctatgaggggattgacgccctgctggaccatttccatggaaactctcaaggcattgcggatggctacgggggtagaactgccatgcgctatgatggtcacgcccttaacgcccaaaagagggcttccccctacggagtccgcagaaaggcgtgctttcatggcgcggaatgctccggaggcgcaggcagctccaaccatgcggaacgggtttgccttaagttcctctttcagccatttgctgaaagccttggcggtggcctcgcatgttttcagcaggacgtttccggtaaaaccgtctgtcagagccacatctatttcatgttcaaaaagatcgtggccttccacattgcctacaaatttaaaagggagcgcaccgcgctcctccaaatgcttcaacagacaaaaagttcctttggtaaaatctgttcccttttcatcttcagagccattgctcataactcccaccttaggcatctgtttgccgtaaacggaacgcgccagaatgctggccataacggcataccctaccaaatgccggggcttggcatccgggttggctccggtatcagtcacattgcagactccgaattcatttggaagctgggtcacaatgcccgcacgctccacaccctcaagcaacctcagtttgacggtggcagccgctacagctgcccccgtgttgcccgcgctgaccacggcatccgcatctccggacttgaccagatccacggaaatggacatggacgaattttttttctttctcaccgccagcaatccggattcgttcatttccacaacttccgcagccggaacgatctccacgcgcggaccggaaagccccaagcggtcacaagagctgcgcaccgtttcttcccttcccacaaggtagatcttttcaatgagagggaaatcccggagggcccgcttcgccccgtccacattaatatcgggcgcattgtcgccgcccatcacatccagtgcaatcttcatattatttgttgaagaaatgtgttagcagaaaaaacagtccgcttcaagcaagttcagccgctttgcgaagcaaaagcggctggaaagtctatatgatagcgccgcaatacggcgataattttcaaggcaaatgcggcgcccgcggaacttacgcttccgccttcaccacgatttccttgccggaacgggtcttgtacgtaccgcaattggggcaggcggtatggccgggggtgctgctgccgcaattctggcacttgcggagcttcggcgcacgccatgcctgagcggcaaggcgggtacgctgcttcatcttggacgttctgcgcttaggtgctgccataattttagttggtaaaaaggtgattaataatgatctcccagttcattgagggcgtcccacacgccgctattcctgatcggggcagaactgtttacacccgttcccccctctttgtccactccaaaatacggagttttcgccatacagtcgttttccatgcctccgtcagcacacttcgggtatgccggaaaatccagaactatttcttccctcaaggaatctgaaacatccacaacattctgtgaatcaatctggaaagaagctgtgaaatcacaaacttccaccacgtagtcaaagtagcccaagcaacgcacgcagcggaatttgaagggggcggaaatattgcctcttacaaacaattcattttcaaatctctgcacatgcaaatcaaaagcaagaggcccaatagaagtaacctcttcatcatcaatgccgaaaatttcagaatccagttcgccgctgtatttttttcctgcctccggcaagttctccagttctaccagcaatcttttcatgagtatatcttacaggcatacttaatgcctgacaagcaggcagggcggcaccattcatggaaaatgacacatccgttcctctttcaggcaatgcccgaattcgctccggcctaaccgggaggccattccagcttgcggcctgccaacagatgcatgtgcaaatggggaacagcttccccggcgtcatgcccattgttgatgaccaggcgaaagccaccttcatccagatgaagagtccgggcaatccgcccgactgccagcatcatgtgtcccagaaggacggcatcttcctccccggcctcggaaaggcggggaatgggcttgcgcggaacaagcagcaaatgttccggtgcttgtggactaatgtcccggaagcaaacacacagttcatcctgatatacgatgtccgcggggatttccccagaacagattttttcaaataacgtagcggccataaaatcaaaaaggaatctgcaatgactttaacatattttgcaaaccgagggcaagttactccctgacggcagaagcgcgtcgcagtcgatccataatagcgcggcccaggccggattccggaacggattccgccacaatgacgtcaatagcttcattttcatccatctgtctcatcagggcaaacaggcgcacggcagcttctgccagccgcccgctgccgggactcatggctaccacttccgcccaatccccttcccgggcaagagcggacgttccttcataggaaagcaagccgtacctcaccccctccaccggggcaaaattttcccccggttccagcagcagcataggtttgcgcggggcgtaatggctggtgagctgccccggcgcatccgccggagattcttccgaaacaggacggcaggaaggcttgcggcgcaccaccttaaccaagttgcgaaattgttcccgggtcaccggcccctcacgcagcaattccagagagggcttgcccttctcgtcaagcacagggcgcacaatcgtgctttccagcccctcggaacaggctccggcatccagaatcatttcaatactgccccccaattccttctgtacggcagaggcggaagtagggctgatatggccgaagcggttggcgctgggcgcagctataggacgccccagcgctttcgccaccccccgcatggcaggatgagcgcttacgcgaacggccaccgtaggaaggccgctggttacaatatccggaatgatatccgcctttggcaacaccaaggtcagcggccccggccagaatctggaggcaagcgtatgcaccagatctttcagcccctccggaacggcggtatatttttccacctcactcccatgatgcacatgaataatcagcggatcaaaagaaggccttcccttggcttcaaaaatccttgctaccgcttccgggttcaaggcatctgcccccaggccgtatacagtctccgtgggaatccctaccagcgcgcccgcacccagagcttccgccgcacgggcatacagtttgcggttgtctgacaggggatctacctcgaacaattcggtttgcatggctttatccttgcctgaagaagctcctgcgtcaagcaagacctccttcccctgaaaggagaaaacagacaaatgaataagagcacgtcctgcggcctcatacttcccctctctttttccaactgcctttacttcactccacccttacggacttccccgagtgaaagctggcgcaggaaaaggccattccgctaaaaagttgttttctcacgctaccggattgagtacaatcaagccatgaatagggccgcatcaacatccttgccaaacatcatcctgatcgggctgatgggatgcggcaaaactaccatcggaaaggaactgcaccgggaaacgaaccttggttttacggatacggaccagttaatcgaacgccagacgggaatgcacattccgcagattttcaaaattcatggggaatcacattttcgagacctggaaaccggaatcctgcaacagcttcagacggccgccgcacaaagccgcattatttccacaggaggaggcatcattatcagaccggaaaaccggctgctactgaaaaaactgggcttcgtcgtctggctccatacagacgtaaacatcctgtaccagcgtatttccagatgcaccaaccgccccctgctccaacaacccaatcccaaggccgtgctggaacatctcatgaatgaacggcatgatttttaccaggaaacggcgcacttgaccattgatacggccaatctccacatccatgaaatcgcattcggcattctggaatccgccagagtattccggtcccgacggcaataatgccgacccgtttttccgtgagcgggaaattttctctttctgattcatcctaacgcaagcgcttccggggaagccctttttcccgctccacgcacaagaaacaacaaaaggcgatccccattaaaggaacgccttcaggaaaataataatgcaccggaaaaggcttaagccttacgggccttacggatcattgaattcaccgtttcagagggctgtgctccgttggcaagccatttgtcaaccttttccagattgatggtatagttgacgccttccttcatggggtcataggagcccacttgctcaatgtaacggccgtcacgacgcgcgcggctgtcgacaacgacgattttgtagtaaggacggtccttggaaccctgacggttgagtctgattgctactgccatatcaattataaataaaaggtgttaatggaaaacttgcgcgccttgccactcacatgcgtgcgcgttcggctttccacagcgggtgcagatgtatgcgatataatggagtcattgtcaataccagagttatttttacaggaaaaaagcctctcctccatttctgcatcaggaaaaattttccaccgccatgcggccaaaagaatacagcatgctgaatccgaaccccgccagcacaagggacaatattccatccagtattccggcataccgtccgtaaaaggaacgaatgggctgccaccgaaaaacaagagcccacaaaatccagcccgccgttcccgtcgccacgattaaaaaacagataaaaagagcatcggaaggatcatgattttttccaacagcggagcggaaagagccacaaagaaaaacgtggccttgggattcatcaggttagtcaccagagcatcacggtaaatacaggaagccggggaaatatccccgcacccggcaaggaaagcattcctccccctcggccatattttctatgccaaatacagcatccagcaggaagcgacgcaaaacagccccacccccaggaaactgtgaaaaacggatgctcctactgtacaagccagtgcagcatgggcaactattccggtaccaatgcccaaagcagccatcactcccgcgccaaagccgtaagccagcgtgctccgggtaacaaaagcctggtcgggccccggagatgcctgggaaagaagcagaatacctgcgaacataagttcttccttcatgaaacaaaaaaacccttatgccctgggatgcgcctgtctgtaaacttccgccattctggcacgcgtcacatgcgtgtaaatctgggtagtggataaggaagcatggcccagcagttcctggacggaacggagatccgcccctgcctccagaatgtgcgtggcgaatgtatgcctgatcttatggggagaaatggtaaaaggaatggaagacagcttcacatatttgttcagcatcatctgcacggagcgagcgcttaaccgggttcctatacgggagacaaacaagggggaattcttcggcagacaggccatggaaacataagtttccagagcagccagagcaggagttcccacaggcaggatgcgctccttgcgccctttccccattaccttcacgccccggaaacggtggtccacactgccgacatccagccccaccagttcactcaggcgcatcccgcaggaataaaaaagttccaatatggcggcatcacggtagggaagccatgcgggagcattggcgggaacggccgtcttatagggaagctccaacaattccaacatctggttgagtgtcaggaaaacgggaagcgttttcttccttctgggaagggaaacgcccgtcatcggattcgtctccagcccgtgcctccgcatcatgaaacggtaaaaactgcgcaaggcggcaaacctcagccggatggaagacgtggcggcttcatccttcagctcctggaaaagccagtccctcatctggtccggcgtacaattctcccaccctgggaatgaatcagccgcccaggccctgaactggcgcaaggcgcgggcgtacacctccaccgtatgaggagaagcctgcttttccacctccagatactgaagaaagccctgttccggttccagaggaatccccatcatgaagaataaattactccgtacctttatccttgtcatccccggcatccaccggcgactccttcagcagcacttcactaatattggcccggatgaacaaatcaatatcgtccggttcttccatggcatacaaagggctgtctttatggctgtccgccagagcctgctctctctccaccgggctgagcacaccgtcctggtccaaatcgtaaagctccatcatttccttcattttggcctggtacagagccgcggcatctttcatgacaacggcatgttcctccggatcaatgcggccgttcccgttggcatcataattctgcagcaacatgttacgagtcagcagaaacaatccgggagcaaccatgaagtgcttccgtcccaccgtgcgaatttccaccatgggcatttccaccccctctgccggagggggcggcggaggaatttccttcctctcggcgggagagtaaaacggaattccgtctctcttgtccggcccggcatccggcctgcgcaccccgcgccgcttctctacatgttcccggaaagccctgtactcttccggggaaagccttccgtccccatccttatcaaacttcctcaggaaggcttttctggcctcccttcgcgcagagcgggcatcctccaccaaccgggccttgtcctgttcggacaaaattcccgtgcccgtgctgtcatagcggtccaaaaccatttggcggatgagcaaagtcacctgaaggcattccagtccgggcctgggggcagtttccattttcccgcggtcgccggaagccacggattgccctgccgcaaacgggaacagaccgaacgccagcgctgcggaacatgacaagataaacatgtggggcaatctcataaccacttttactaaccccgccggaaaaagacggtttcaaaaataaacatccgcccctgccggcgggcgacacgggcggatgcaggaaacgtacggaaagcggaaaaacttacttctccacttgaacgatcgcgttcttttccaattcaatcaccacgccttccgcaatcttgagagaaacggtgcgctcattcaccttctccacaaaaccgtgcagccctgcgtttgtaatcaccttgtccccgcgctgcagggctgcgatgcgcgcctgctgctccttctgcgccttcctctggggacggatcagcatcacccagaacaggacgatgataatcacaaacatgaacatggggctggcgagaatctgctgaaacatatttgcgggttcctgcccggcggcgcccgccgcatcctgagcctgtgctaacataaagatattcataaaatgtcgtttgctttataccgcgcgataaacgaatccttgaaggaaccgaacgtgccggcggctatggcctcgcgcgcctgggccatcagccggagatagaattccagattctgaaaagaaagcaatcttaaagcgagtatttcaccggctttaaacaaatgccgcacgtaagcgcgggaaaattgcgtgacatgcggatgtccctccgggtcaattgggcgggaatccgtcgcccagcgctgattcttgatatgcatggggccgtccggagtcagcgccacgccgtggcgagccaggcgggtaggcattacgcagtcaaacatatccacgccgcgggcaatcatttccagcaattgggggggggtgcccagccccatggcgtaccggggcttctcctccggcagccagggagcggaatgatcaatggcgcggagcatttcatcctccggctctcccacggaaacgccgccgatggcgtacccgtcaaaatccatggcggccagttcttccgcgcacttctttcttaaatccgcatacacggaaccctgcacaataccgaaatggtgctgacgcccttccccggaacgggggcgatgttcctgcacccacgccttgcagcggcgggcccaacgaagcgtgtaccccagggaggcttccgcgtacttcctgtcgcagggataaggggggcactcgtcaaacagcatggcgatatcactgcccaggtccgcctggatctccatggaccgctccgggctcagcatcatgtacgccccgtccaaatggttctggaaacgcaccccttcttccgtaattttacggagcttggcaagggaccagacctggaacccgccggaatccgtcaaaatagggcggttccaggaggaaaatttgtgtaatccgcccatttgcctaattaaagcggaaccggggcgtagggacaaatgataggtatttcccagaataatctcagctcccagcatctccaaatcctgcggatgcatggttttcacggaaccctgcgttcccaccggcatgaaaatgggggtggaaacccgtccatgcggcaactcaagcgaccccaggcgcgcagccgtggaggaatctttctgatgaagtataaaaggcatcggaatcagactttctgcaatttgataaagcgggcgcggtaaatcggctttcccatggcctcccattgaagctggaaatccgtacggggataaaaaaattcgtcctcatcccaactggcacggctaaacagaccgctgcgcgccacatggtccagcacccacagaaaatatccttcatgatccgtcttgaacaggaactccccgccatcggacagggaacggtgaagcacgggaagaaaatcctcctgcaccagccggttcttatgatgcctctccttgggccaaggatccggacataaataatgcagccgggaaatgcagccgggctgcatcatccattccagaaagtaacggctttccacgcgaaacaccttcacgttatccaacccgcggacggccgcccgggaacaaaccccccgtacgcggcccaaaagccgttctattcccagaaaacggcgctccggataatgggccgccatctgaagcaggaatcctccgtccccacaccccaaatcaacctcaaacggaccatccgcgccaaaaatatcagaaggcgccagcaccttgaaaaaatcgtctggaataaaggccggatttatcatgggaatcaacgtgcggataagatgcgttacaaaacggactctgtcaaacgagaagaccctctccccgcaagcatggcgggaagaggcccgaaaaaacggaaaaaataagccagaacggcccggaaccgtcagctccggcaataaaggcgattataaattttacggtcaaaacggtaatagcgcgcggcgcggtgaggaaccccctcctccttctcatccagcggcacaatgtaggggcgggaagcgatctttttgtggaaattacgcacatccatggacttgccgtgaatctcctcattcagccgccggagctgaagagccgtaaacttggcaggcagcatgtcataaatcagcgcaggctccttcttcacggaagaacgcactctctccagcgccaggtcaataatatcccggtgatcaaacgccagttccggcaaatcatctacaggaacccagcgggtcttgtggctttccatcagtttgcgcagcttggtggaaatcctgagcatggccatgtaggccaccgtcaccaggcgtcctatcttctggccggaaacagcctccacccatgccctgtcctccggattcttgatgcgcgatggcgcaccgaaggtatggaactgttccaaatggggggaagacatgccggtcatgtcaaacaaaacgcggcgggcagcggcatccagttcttcctcctcataaatcaaatcgccgggcaatttggaaatggcgccggtatggccgggttcaaattgcgtcttctcaaccagaaggactttcaaaccttcttcatcgaacccgatcaacacacaatccactgagagatgcggataaaatgcctgcctgctcattatgttatctattattgtagtaagttcccagaatcgcatcaacgctacgcaagcgaaccagccaagtcaaccaaaatcaaaatagaaacggcaatgaaaaaccggcccgcttggcaccgggaaacatcacgccacttccggaagactgcttctcacgggcggaaaaacgcgcccgcgtcttgcatttcatcatcaccccgtccatataataaaatcatgcagacaggtatcctcaggggaatgtccgtgctggccgggctgctatggctggcatcctgctcgtcctctcccaaaagccgggattatccgggctacatgacccgcccctataccatccgggggcatcgctaccatcccatgaacgtggaacaggcgctggtgtatgaacaaacgggaattgcctcccattacaatgaatgcgccctttgggggctcgtcagcggaaaaacggcaatcggagaaaacgtgcgcccctggcatctgcacgcagcgcatcccacccttcccctcccgtgcgaagtgctcgttcaatcccttcgaacaggcaaaaccgtaaaagtccgcgtaaacgaccggggccccttcatcaaaaacagaatcatagatcttagtgaagaagccgcagaacggctggacatgaagcaccatgggctggacaaagtcagaatcaccgtcctttccgtaggagacgggaaatggaaaaaagaagcgcccccttgcgccactccggcctgattccctacttcaacacattccgtgtggtcttaaaatgcatcttggccaccttgggcagcatttcttccccatgcagggccaccagctggcgcgcagctttcaccacttggccggaagctcccagcggcaacttcatgccggcgccctctcccgccgcatccatccagttcacaaaacgttcgcgcgccagaatagatgccgcagccacagcaacatcactctccgcccggacacgctgttccagccggacacacacctttttggcggcaagcgccctcttcagaacaaacggattggcgaactggtcgctcaatgccatgggacaatccggcaccttggccgccagcccctcaatcaccgtagcatgcccccaggcgagaaaacggttcaaattcccgaactccggataaagctggttataccgttccgggccaatgcttaccagatgaaaccggatgcccggcaccctgcggatcccctctgccaggcaacggattctggatgaagaccctaccagcttgctgtcacaaacgcccagcttgcgcaatgcggcgccgatgcccccgtccacataaacgccggccaccaccagcgggccgaagtaatctccctttccgctctcgtcaatcccgaagtggggaacaaaaccacctccttcttccatctcttccggctgggccaaaactccggtcacctgcggttccagcgtaaactctataaaatcatccgttccctttccctgcagaagaagcttgttcttcttctcgtaaaccgtcgccagcagggcaggcccggcaaatgaaaaacgcgcatagggaacctctcttctttcaaaccccttttcctcaagaatggactcaagccttccggcctgggcgtcagtcagcatggttgtaaacgtggttcgcatatatccttcccggagccggaacactccggggcaagcaatggaagcatcccaaccattccggtcaagcaaaattcccgtatcacgcggttgaggacgtaaaaatcaagcatgccacggattatgtgattttttaggagacaaatcatgcacgctgaactataaaactcatacattcatatcattctgctctccatatggctaaaacattaacaaaacgagacctcgttaacaaaatcagcgccgaaaccaacttcactcagattgaagtgttcgacatcgtacagcgtgccgtggacattatctccagcacccttgctgaaggcgaccgtgtggtgattcgcaatttcggaaccttccaggtgaaggaagtgaagcccaaagtaggccgcaaccccaaaaatcccgaccaggatgtgccgattccggcccgctccgttgtcaaattcaaggttggcaaggaattgaaggatcaggtcgccaagctgaccgcctccaagtaatccccacagggatcagacagattactccgggtgcctccatcaagcaatggaggcgcctttttgtttgcaatttgcgcggcattcgggaatataagggaacgtgagcatgttccggatacagcaccttcttctgatcaccgtagcagcactttgctcctgtgctacagaacgcacggtagctacaaactttcagccccggcaacgccctgattcggaaaaaacggacgcagagctgatggatgccctggaagcgaaattcgctggcggcttcggccagcagacggacaaggaaggaaacaccaggatggtgtcccaaaaacggagttcctttgaagggctccggtacagcggcaacacgtctcaaatcgaaaaaaaggcttttgaaaccgcatcctttgaaaaaaagaaatttgacggcgcatccacccggtttgaaacgaagaaatgggacggcatcaaatccttcacggacgataaactggaaacgccggacttcatcgcccgcgccaggggagtaaatacccactcctggcaggatgcctccaaacaatacgccacgcagcaatccgactttcatggacgctcctggaaagatgcggacaagcgcctcggccgcactgtcaaccgggacattgaagccaagagacaaagctttggacagccaactatcatgagtgcgcggcaggcccaggcgcatactattcaggaaacgcgggaaatgatgggacgcacggactgatgcgccgatgtttcggacgtgctcccatgccacatttcagattcgacattgttttcagccgccatctataattctgcccgtgagtgccaaagacgttcctccttccatcaccctgcctaccagcgactactataccattgtcaaaatgagcaatcatgccgtcgtgggagtattccgccagcatgtctttgcgcgccgcagcacgcgccgttatgcgccccccatccctgaagaacacgactcctattgcgttaaaagaactccggagcgtgtcatggtccaaatctttcatgacggcaacgaagtttaccgttgcatttttgtgccgcctgccgattattgacggcaggacaaccatgaaagctccttttttcagtccggccttctgcctcattacaagcctgattacagcctgctcttctccctccggccccaatgcgtggacgccggtcacttccggtcctccgcgtgcgcccatcccccagaacgaagttctggtcattgacgaataccccatgggggaatacaccaacgtggggcattttaacgggccggaagggcgcattgtccatgtctctatggaagacaaggaactaatcgactacttcaccaaggaagctgcggccatggggggcaataccgtcgtcatcagggaaccgcgcatccgctaccgttccggcgaaggcaagagcagccgggtggacgtcatctatgttcgggaagaaatgggaacacacggtgcggaagacctgggcatggactcgctccccattgatgaagaatctctgcggatttattagagccgccggaaacgtcccaggtgccatttcctgcccggagttttttcagctctttttattggccgcaccgcaatgtgggcactccgcacggaaattccccttctccatataaaaccggaatccgcatatccggcactggaacttgcgcctccgatccaggaaagatcgtatccatcccacagccaggcaaacagacaccacagcgcaaaaaccgccggcgcccagtaaaaacaggcgcatcaaaaaatcttggaggatcatattcacggctcttcctccttccattcgatggacatggtgccgctccgcggctcccgggacggaacccagcgcaaagaccgggcgaacctcattgcggactcatccgctccattacttccggaagactccagtaacaaaacttgagaaggaacgccccatacatccaccaccacaaaaaaatcactcctcagccccgtgtgatcttcacttctggaaaaaccggacagggagccggctgtaacaatccgtccatccagccccggggaacaaaaagacaaatagggaatgcatgttccggaaatctccaaggaaggattcatcatggcgcgtatatgaaaatccggatgctgccacatacgccagacctgatccgccacagtgggcacggacacgggggggagaggggccagaggcgtatctgcggaacgcggagaaggcaaagtcacacccatttccccggtcgggccggccgtcaccggatcagcccaaacggggcctctcacaggcagaggagtattgcgcagcacatactgatgcaggcgcggattatctgcaggcagcagcaccacggcacccggctgatctcccctgctgcggatttccggcacctccacatggacaaaaaggccggcggcaaaagcgcaaacgccaaaaaaaagcatccacagaaaaatacgccagcgcaacaggccggtttccctccagtcaaacgtcaatcccaaatgaaggtcgaaaattttatcccggctctttttattcagcttcatgaggtaacaagggaaaaaatcaatccgcgggctcggcggcaatataacacgtcatccccttggcaagcaccatatccaccagctgctgttccagggcccgtgaaacggaatcatccaaacgcagggcaatccccatacggctcccattctccccatgctcccgggaaatccggtccaattctgaggaaacgccgggcagcccgccttcaatcaggcggtttccgatataaaaagcgggctggtcgccagccgtaactgaaataaactcaacatcccccacaatattcatcagaaaatgggaagaaggagcctttacctcatacccgtacgccattcccacacgggaagtcatgatcgtcagcacgaagacaagaacaaccaaatccagcaggacgaccacctgaatgaaaaacgccccggcgggcaatgttgaacgggtcttgatctgcatgcctttcctccttccctgttgcactcacacgccccggccgttcatgctctctccggcctcgcgcctctgccgggcatcacacaccaggcaaacggcctccgtgccggcccgttccagggaatgtacaatctggcgggagcgggaggccaggtaggaataaaacaaataagcgggaatagcaatgctcagccccagggcggaactaagcagggcctggtaaacggcatccgacatggcaagagagggagccttcccttccagaacccccggctgggaataaaatcccaccagcccctggatcgtccccagcacgccgactagcgggctcaccgtagccactaccagcaatccgcggatattcttttcaatctgaaacacttccatctgaacggaatcctctgccacagtccgtagttcttcacgcctcaatccggcatgcgccagcacggaagaaaccacgcgggccgcaggtcccggtaaaatggaagcctcatgccgggcttcatccgtctttccggcatttaccagcttggaaatacctcttaaaaaatctccagtattaatttgaatcctgtgaaaatacaaaatccgctccgcgacaaccgccagcgcataaacggccagaacgctcaaaacccagaacaacggacctatcttgatgatcaattcattcataaccctctttctcgcgttagatcatgcacacttcccatgtaaattcaactcaaacctatgtggcccggcagccgagcttctgcagcagccgcgttcccgcccataataagacggaaccaagccacagcagggaaccgaaactcaggagccataccgcatcaaacaggcacatgccggaaagcagcaccgtcacagccctttgaacccggggcctgcccgcctcacgccgtgctacggcagaaatcacgcaggtaaacaaaaacaggccgaaagcataccacagcaaggccggaggaggaacggactctccacccgaacgggcaaatgccaggccggcggccagcacccacaccccgcggcacaaccccatcaaaacaagggagccgctccacagtttatggaacacattatacagggaaatcacaatcagcagcaaagcccccacggcaaattccccgcccagcgccatgttcagcaccaggccggacaacccggtcgccaaagacaacagcctcagtacggaaacgctcaccgcgccgcacggcacggggcggtccggataacgggcggcatcccacctggcgtccacacggtcattctcccacatgccatacaaataaaagcacagccccatcagcactacgcccccatacagggcgggaagcggcagctccgccccacggacggaagcccacgccgccgccgcgttggtaaacagcgtgggaatattggccggacgggaggaacggagcactcctctcaataaacggcaatcatgcatcgccgcatactgtacagggaaaaacggcgatgaccaagcacatccacagtcagcaaaagtgcaggaaccggcatcccgcccatgccgggcagcatccatacatacccagaaatagattgtctttgcaggactgtcccctatcatgccggaggcattaaaaatactcttctctccccccatgaatatcaggacccacatccaggcgcttctcatctgtaccatgcccctgtccgcacaggggcaaagcatcgtggattcacgggcctcccttccacgagccgtccagcttcacggggatgaaggcagggaaacggtgcggccagacgaatccaagcgcatctctccgaacgaagcgccggcatcccgtgttcagccccagcggatcgtcaaccggattgccgccacagtcaacggccgtcccatcacggccaatgaggtcagcgtgcgtctcatgcccatcggagcacagctcgcggcccagtatcccaaacaggggcccgaattctacaagcaactggccctggcgaaaaaaaacatcattgaagacctggtggagcgagaactgctccgcaatgaatttgaaggcatgggcggcgtcattagggactctctcattgaccaggaagtcaaccgcaccatcctgaccacctttaacggagatcgttccgccttcctgaaaaacctgagcctctccggcatgaccatccgcgctttccgggaaatgacgaaaaaacagctccaggttcaaatcatgcgggcttccaaatacgaccaggaaataccgcctactccggaggaaatacagcaggaatacgaatctaccaaagaacaataccgggacctgaccaaagacaaaatcaaattcaagaaaatcttcattcccatgctgggggatgactccgcctccacgccggaagtacagctgaacctggcggaactcatcgccaaggaaatcaaatccaaaaacgccacctttgaggaaatggccaaacgctactccaaggatctatatgcggaaaaaggcggtgactggcccgttacggaacgctccacgctctccccggaatccgccgccatcatctttggcgcacagcccggcgaaatcatcggaccgttggtggactccaccggcttcaccatcgtattggtggagaaaaaggaactggcgccgccgccccccctctccgccatcaaggagcagattgacatcatggcgcgcaacaagcgcagcaatgaacgttataaaaaatgggtggaacgcctccggaaaaaagccatcgtcaaaatatacatctgatttttctcctttccccattgccggaccggcccattcaacaaggccggtccggcgttctctctttcattccctctgtttttctttccgccaaccgttccgtccgctctccttctcctgccgggggcatcttcctctcgcccatatctccggaagacgccttcatacataactggacggcggccgcaagtcatcccgcctgacgcgtggaaccctgctgacgtaatccgggcagaaaccgtatcctgctgaataaaaatcttgcaagatggcagatttccagtcgtaatatcacagatatgttcaccaatattacacgcacgaccctctgcattactgcgttcagcatcgccagcctcatggcggcgcctctgaatgcaaccaaaacggagagcctggattggaactggaaattcgcccgtttcgggaaaatgccggatggcagtacgcaaccggaaccgggaaaagccatgggattcgccactgccaccagtgaagaatccggcaatccggcggacaatgccgtggacggggacaagtccacccgctggtgtgccgccagtggcaaaagcggagaaaaaatcaccgtggacatgggacgccccgtagatgtaaaaaccgttaacatcctgtgggaaaaacaaagcaaccatcttttcaagctggaaggctccggtgacggaaaacgctgggcaactattgaagacaaaacttccgggcaaaacgactccaaggaagacacggtagaaaacaaaaccggcaaaccgcgatacttccgcatcaccgtcacgggcaacaaccagagcaactgggccagcatccgtgaaatcacctttaaaaacgacaagggggaaattatccgccctcaggccgccgccggaaccagtaaggcggacaatccctccagcccctctttcaacgacaaaaactggcgttccttgaacctgccgcacgactggggcgtggaaggacccttccggatggaaattgaaaacagaaccggaaaactcccctgggtcggcattggctggtaccgcaaaacgctggaaatcccggcggacgccaagggcaaccaattctatctggactttgacggcgttatgtcccgccccaaaatttatgtgaacggacacctggccggcgaatggaaatacggttacagctccttccgcgtggacatcacgcccttcctgaaattcgggcagcaaaataccattgccgtcagagtggacaatccccccagcacctcccgatggtatccgggcggcggcatctaccgccacgtgtggctcacggaatccaaccctgtgcacatcgaacactggggcgttttcgtcaaaactccggaaatcaccaaatccgccgccaaggtggaagtgaacaccacggtgaaaaacaccacggacaaagccgtcatccccactgttactgaagaaatcctggacgaaggtaaaatcgtagcctccacaaccaccaaaggggaagaaattcccgccggggaaaagggcaaaatcaccagcacgctgacgctcaaaaaccccactctgtggacgctaaacgctccccatctgtataagatgaaaaccacggtcaggatgggagacaaagtcatcgaccaaaaattcaccaacttcggcgtaagaaccgttgaatggaaacccacgggattctaccttaacggggagcgcgtgcagctcaagggcgtttgccagcaccatgacctgggaccgctcggctccgccgcccacacgcgaggctatgaacgccagattgaaatcctgaaggaattcggcgtcaactccatccgcacgtcccacaacccgcctgcgccggaagtgctggacctgtgcgataaaatgggcatcctggtcattgacgaacttttcgacgtatggcaatgctccaaagaaggcgtcaacaacgaatcctttaacgaatggcatgaacgggacgtggttaacctctgccaccgggaccgcaaccacccctgtgtcattgcatggagttcgggaaatgaagttccggaacagggaatgaaaaatctgcaccatatctcccaaaccctgacggatcttttccaccgggaagaccccacgcgcaaagtgacttccggctgcaacaacgccaatgccgcacgcaacggctttggggacaccctggatgtttacggctacaactacaagccctgggcctacaaggacttcgccaaggaccgcccccaccagccgttttatggtgcggaaaccgcctcctgtgtcagctcccgcggagaatacttcttccccgtggactggaacaagggcaagggattttacctctaccaggtcagttcctatgacctgtacgcccccggctgggccaaccgcccggatgtggaattcgccgctcaggaagacaatcccaacagcgcgggagaatatgtatggacgggctttgactacattggggaacccaccccgtacaatctggacgccaccaacgccctgaacgtgccggaagggccggaacgcgaaaagctgatggcggaactcaaaaaactgggaaaccgcgccccctcccgcagctcctacttcggcatcgtggacctgtgcggcttcaaaaaggaccgcttctacatctaccaggcccactggaggccggatcttaagatggcgcacatcctgccgcactggaactggccggaacgcaaggggcaggtaacgcccgtgcatgtctacaccagcggggatgaagcggaactcttcctgaatgggaaatcccagggcgtccgcaaaaagggcaccggggaaaaggaccgctaccgcctcgtgtgggaagacgtcaaatacacgcccggcaccctcaaagtagtcgccaaaaaggacggtaaaatctgggctacggacacggtaaccactaccggaaaacctgcggcgctcaccctcaagccggaccgcaacgaaatcaagggagacggctatgacctgtcttatgtcaccgtagccgtccgcgacgcccagggccgtatggtgccccgaagcaaaaaccagctcaccttcaaggtaagcggccccgcggacatcgccggcatctgcaacggtgatcctacggacttcaccaccatggcgaatccggaaaacaagaaaatcatgaaaatcaaggccttcaatggccttgcccaggtcattctgcgctcccgcaagggagaatccggaaaagtgacgctccaagtcatctccaacggactcaagccggctcagacaactgtgacggtcaaataaaaaaacaggaaaaactccgttccagccgccgggctccatcaggaacccggcggctttttcatcacattattccggggaaaaagagccatctttccaccctctcctggacaggtagggattgaaagaaaaaaactttatgctacccttttgcccatgtctgatctgcccaaagcatacgatccttccctggtggaagaaaaatggcaatcccgctggattgaagaaggttgtttcaaggctgacccggcttctgaaaagcctgcctactctgtcgtcatccctccccccaacgtcacgggagtgctgcatctgggccatgtgctgaacaacaccatccaggacatcctggtgcgccgcgcgcgccaaaaaggatatgaagccctctggctgcccggaacagaccatgccggaatcgccacgcaggtaagggtggaaaaagacctcaaacagacaacgggccggagccgccacgatctgggccgtgaagccttcctggaaaaagtctgggaatggaaagaaaaacacggaggcatcatcatcaaccagctccataagctgggttgttcctgcgactgggaccgcgaacgcttcacgatggatgaggaatacaccaaagccgttggacaggtcttcattgaactctttaaggaaggactcatctaccggggccgccgcatggtcaactggtgtcctgtatccctcacggccctctctgatgaagaagtcatcatgactgagcagaaaagcaagctctacaccgttctttacaaactggaagacgggtccggagccctccatgtagccaccacccgcccggaaaccatcatggcggacgtggctgtggccgtcaacccgaaggatcctcggtacgcccacctcatcgggaaaaacgtcatgcgcccgctcaatcccacccccattcctatcatcggagatgaatatgtagaaatagaattcggcacgggcgctctgaaaatcactccggcccatgacaaggccgactttgaaataggccggaaattcaacctggaaattatcgacatccttacccccgacggtcatatcaactgcccggaagtgcccgaactccacggcatggaccgctttgacgcacgccgcaaatccgtggaaatgctggaagcctccggcctcatggtcaacattgaagactatgataacaaagtcgggttctccgaacgcgccaatgtcccgattgaaccgcgcctctccatgcagtggttcctcaaatacccctgcgtgaaagaagccgcggacgccgtagcgggaggggacatcacttttcgccccgcgcgctgggcgaaaacctacgcccactggctggaaaacattcaggactggtgcatctcccgacagctctggtggggccatcgcatcccggtctggtaccgcaaagacaaggcggaagaactcaggaacgccccggcgctggatgcctccgcactggaacagggcttcctctacgtgggaaccgaacctccccaggacccggacaactggattcaggacaacgacgtaatggacacatggttctcctcctggctgtggcctttctccaccatggatgaggaaacccgcgccaaattctatcccactacggatcttgtcacgggaccggacatcatcttcttctgggtggcgcgcatgattatggccggataccgtttccagcatgacaaaccgttcagcaacgtctttttcacgtctatcatccgtgacaaaatcgggcgtaaaatgagcaaatccctgggcaactccccggatcctctggacctgatcgccaactacggagcggacggtctacgcttcggactcatgcgcatcgcccccacaggaacggacgtgcgctttgatgaaaaccagatcagcgaaggccgcaactttgccaacaagctgtacaatgccacgcgcttccggctgatgcagggagatgccaggggagaaacggcccctcactactcatccgtacatatctccattatctccaagctcaagcaactgcatgcagatgtagaaaaagcgctggcggactacgaattcaacgccctcatccaaaccctgtaccaattcttctggaacgaatactgcgaccgcttcctggaagccgtcaagggtgacctgaaggacggggcggacccagcggcacaggcagccacgctcaccacgatggacacggtgctcaggcactacctggcccttctgcatccggtcatgcctcatatcacggaagaactctgggcctccctgggctttgcggaaagcaacggcggcctgccgctcatgcgcactcctctcccctctgccgaaaacctcctggcaggacttgatgaaagccgcatcaccctggcgaatacccaggccgcagccctttatgaaacggccaacaaggcccgcaacctgaaagcggaatacgacctttccaacaataaaaacgtcagcttcatcctgaaaactccccacgacgtaccccaggatatcctctcccgtctggccattttggcgaacgccaaatccgtcatccgggacgcagcttactcctcccccaagggaacgcctgcggccctcacgccgcttggggaactcttcctgcccctggaaggccttattgacgtggaagcggaaaaggaacgcctgggcagggaactggacaaaatagccagggaaatcgccaaatccgcggccaagctgggtaatgcgggctttgtggaaagagctccggcagaagtcgtgaatcaggaaaaagcccgtctggcggactgggaggcaaaacaatcccagttaaaagggatgcttgattccctttcctaaccatctatcattccgggaatgaataatattcaaaagtactttgccggccgcgagcaattcattgaattgcttgaagcggtgggcatacgtactcttgaacaattcgcttccgcggacccctccaccgttttgcctgaacttcaccaggcaaaacggatgctgaaactgcagacggaaattccttccgctcccgttttcagggaatgggtgaatcaggctctttcctctcctactgcgccggaaccggagcttcttcccatccatgagggcgacggcctcccccttgccactcccgttgaccctccgattactgattctttagaaaacagaagggaacgtgggcgttcccatacggacggacctccaaaacatctctccgccaaggccaggctgcaggaagaacacagctaccagcccgcaaaacatgttcacacccacaaggagccgaaaacctaccttcgcaaaaaaggcatcaagcacatgacctccttccggacatggatgggagccgttatcgtcctgctcctgttcatctgcatcctcttctccatttcggtcaccacccttgtgcttctcaatggagaacgaggctggccgttaatcagcctctgcttcggcccctggattctggcgctggttctctatctttccctggcgcttccccggaaatgcagcgtgtgcagggcccatgtcttttcctttaaaaaatacacccgcaataaggcggcccaccacattcccctgttcggctacgtattcgccacggcactgcatatattcctcttccgctggttccgttgcccggcctgcggttcctcccagcaactgggaaaaccccgtaccgaaccgcacaggcattaacgaagcttaattcctgcgccaggcttcacggtatcccggcctcctgcctcctttcttccccttacctggcattcggaaggcggttcctccatctgtccgtcccttccattatctgcccctattccccgcacttcaaccccacgctctgacgggacaggaagcccctgcccgcttccgtatctcatggaacggctcccggcaacgaatccccccttcccggtaacttattctataaagagccaccattaggaaccgcctcaaaaccggatcggaaaaatccggcaagaaggccgtttctccgtctcttccggataaatacgtttcctccttcctccggatatcccagcaactcaaacatgcgttcaacgtcatggaaaagcatatccctgaaaacggcagtccaggaaaacaagcggacatttcaacaaccggaattcccccttcattaacctattccggatttgccggcctcgtgcgccaggcaagggctgcgctccggcaaccttctccctatatgggaagcacaccgtaatgaaaacttatcagaaaaacggggacaataaaaaacgccatcctccttttcggaggatggcgtccaaaatcctgaggcgtctcggttagagcacttccggagcaagggaaacaatcttcatgaacttcttttcacggagttcacgagcgaccggcccgaaaatacgggtgccgcgcgggttgttgtccttgtcgatgatgacgacggcattgccgtcaaaacgaagcacggaaccgtcatcacggcgaatcggggcggcggtgcgcactaccacggccttcaccacggttcctttcttcacggaagcggtgggaatggattcgcggatgtggcaggtaataatgtcgccaatgtgagcctgacgggtgcgcttgccgataacgccaatcatcttggcggagcgggcgccggtattgtcggctacctggactagggattccatctggatcatggtatcaaatctcctttacttaatggttgattcctgattaatgggtaagcacttccaccagttcccagcacttcagcttggaaagcgggcgggtttcaacgatacgtaccttatcgcctaccttggccgtggaattttcgtcatgggcatagaacttcttgctcttcttgacgatcttcttgaacttggggtgcggaacgcgggcaacgtattccacaacgatggtcttgtccatcttggtggaagtcaccacgccgacgcgcgtcttgcgaaggccgggcttcttggttgtttcggtttgttcggacattggattctaaaagtgttagaatattctgtaattaccggaaatcctcaattaaacctccccggtttcaccctgaatggtaagggcgcgggcaaggtccttgcggacggtgcggattctctggttgttttccaactggccggtggcctgctggaggcggagattgaaaagttcttcacgaaggctgcgcaccagagcggaaagctccttggcggacatagcacgaagttctttggcggagttcttatcggacatggtgatgagtagctttagtgttgaacgccttgacgatagacgaagcgggttgatacgcccagcttgttggaagccagtcgaagggcttcacgcgcctgggattcggtcacgccgcctacttcaaacagaatgttgccggggcgaaccacggctacccagccttccacggcgcccttacccttacccatacgagtatccgggggacgggacgtaaaggatttctgcgggaaaatgcggatgaacaccttacctttacgtttcaggtaacggttgatcgcaatacggcaggcttcaatctggttgttggtgatccaaccgcggtcgagcacctgaaggccgaagtcaccaaaagcaacataggtaccgctggtggcattgccggaacggctgccgcggtgcatcttgcggtgcttcactctcttgggcattaaaggcatatcttattcctccttgtgttaagtgtgatgaacaaatgtggtagcggctttcttaggcgcgcggacgacggggtccgcgagggccggacggacgggaattctgctgggagacgacttcatcgcgcttgttgacccagcacttcacaccgatgatgccgtacagggtacgggcttcggcaaagccgtagtcaatcggagtgcggagcgtttgcaacggcaccttgccttcgcggtaccattcggcacgggcaatgtcagccccgccaagacggccggcgcagcggatgcggatgccgtcggccccgcgttccatggcaacctgcacggcgcgcttcatggcgcggcggaaggaaacgcggcgttccagctggacggccacgttttctgcaataagctgggcgtccgtttcaggggaacggatttccacaatgtcaatgttgacctgggtggaagcgccgcacaggctctggaggtactggcggatcttttcaatttcctcacccttgcggccaatgacaagccccgggcgggcagtgtggacggtgatgcggacactgttccaggcacgctcaatcacgatgctggaaacggcggcggacatcaactgttccttgatgtacttgcgcatcaccaagtcttcatgcagcttggtggcgtaatcctggcccgtggcgtaccacttggagcgccagtccttgttgacggcgaggcggaacccgattggatttactttctgacccatgatattagttcagctatatgtgtgttagattggtatggcctagccttcttgatcggccaggataacggtgatatgggatgtacgcttgcggatcatgttggcggatccgcgggcgcggggcatcgtgcggcgcatcgtgggcccttcatcgaccatgacggacttgaccaccagcgtatcaacggacagttccgcattattctcggcgttggccaacgcggacttgagcgtcttattcagcaggtaggcacctttcttgggggtgtaggacaggatgtcggtcgcctgggagacggacaagccttggatttcttgagcaacatcgcgcatcttcttggcggagatgcgggcgtatttgtaaacagctttcacttccatgggtttttcctcgtagtgcaggttattatgaagatgatttagtcgttggtttttactgaggcagaatctccgacgcgcaccggatcggctggcgtctcaagtttctgaacaagcgcgccacatacttccttgcggacgtccgtgactacggcttctccgatggtttgagctccccgggttaaccgaaccggcatcccgacttgcattcctgccgttctgccggtattcagcaccaccactccggattcggaatcaatgctgagcaccttggcttccgccagggttcccgcgccatctcgcacgggctgttgcctgtatcccagaacggattccagcaggcgcagagaactctccacagccgtcctggcgttcgcatcttcggatatggcttgtttcatgtaggcaaggatggctccggagagcttgacggatgcctgctccaaccgctggacgcggtcattaaaagcttcgatgtccgccatcgcctgaatcaggcgttcctcgctgttacctagcgcagcgccccccaaagcttccagcctggaacggatgtccaccagctgtgcggccgccttgtcggcgtcgctgcgggcctggacataggatgccttgagggccgcattctgcttttcgaggcgctcgattctgcgcgtcagtgccgccgtatcctcttccgctccctgcaacgccccgcccagccctaccagggtggtaagagagtatgcaaggatggaagaagaattcgacatgttgattgttaacttactgattacttcttaccgataccgccgtgctgtttgaagacacgagtcggggcaaattcaccaagcttgtggcctaccatgttttccgtgacgtacacggtggcaaagttcttgccagcgtgcaccaggaaagtcaggccgacgaagtcaggcgtaatcatggatgcgcggctccaggtcttgatcggcttgcggtcgccggattcaagctgagcgtcgatcttggcgagaagcttttggctgacaaaagggccttttttgagagaacgtcccatgttatataatcctagttaaagttataatatattgattacttggcattgcggcgctgtacgatgacggagtcgctgggcttgcggagacggcgggtcttctggcccttgacgtggccccacggagatttgaggtgctggcgaccgccaccggacttggacttgccttcaccgccaccgttcgggtggtcgacggggttcatcgtcataccgcgcacggtaggacgaacgcccatccagcgggtacggccggccttgccggacatttcgttcatgtgctgggtattgcctacctggccgatcgtgcagtagcaatcttcattgaaacggcggatttcaccggaaggcatcttgatcagcgcgtaacccgcttcacggttggaaacgatggcctgctggccggcagcgcgggctaccttgccgccggaacccggacgaatttcaatgttgtgaacggaagtacccagaggaacgtttttcaagggcatggcattgcctaccttgggagcaaccttctggccgctttccaccttcatgcccacctgcagccccgtgggggccagaatgtaggatttttcaccatccttgtactcaatcagagcaatgcggcaggtacggttgggatcgtattcgatagtaaggacagtagcgggcacgtcaaacttgttgcgtttgaagtccaccaggcgatatttgcgcttatggccaccgccaatgtggcgggtggtgatgcggccattattattgcggccgccggatttcttgaggggtctgcagagactcttttccggggtagaggtggtgatttcgtcaaaggacggccacaccttgtaacggttagagggagtaactggcttgaatgacttgagggacatgatagctttccttcctaataggggctttaaacgaggtcaagggtttcaccgttggcaagcttgacgtaagcttttttccaatgagcggtgcgacctgcatcagagcggcgctggcgcttgagcttgccgtcatagttggcggtacgcacggatgcgaccttcttgccgaaagcaacttcgacagcctttttgatttcgattttgttggcgtcacgatcaacttcgaagaccagctcgccggtagtttcctggagcatggtggccttttcgctgatgcgcaccttcttgatgacttggtaaatgtctttcatggcttcttaagcagtacggctggcgagggtttctaaagcgttgtcaacgaggatcactgcatcagcattcatgagctgttcaatgttcacttccgcagcggtcatcaggagaacttcctgaacgttgcgggcggcacggtaggtggtttcgtcaaaggaagctgccacaatgagcaccttcttggcatccgtcaggtctttgacggctttgatgaaagatttggtcttgccgtcagccacggaaaattcggaaacggtgctgaccttggaagcggcaatcaggtcacccagtacgcggcgcagagccaggcgtcgggtgctcttgttcaccttcttgctgtagtcacaggggcgggggccgaagaccacgccgccgcccacaaagatgggagcacgcttatcgccgtgacgggcattaccggtgcccttctggcggaagatcttcttgttattgccgctgacttctgcgcgggtcttggaattggcggaaccggtgcggcggttcgcctggtaagccacgatcaggtcatgcacagcctgggagcccttgtcactgcctacaacctggatgttggcggcggcggcggcttctaatgtaaaggtatttgcggacatagataggttttcctataatcaatgtgaggttaactaaagccttacttcttcttggcggggcgaatcacgaggtaggaaccgcgcgcgccgggcacagccccggagataaggatgacattatcttccggacgaacggcgacaaccttcaggttctgcaccgtgcgcttggcattgcccatctgtccgggcatcttctggttcttccagacgcggccgggggtggaacaaccgcctacgccgccggtacggcggtgcatcatggaaccgtgggcggcgggagagccgtggaagttgtggcggcgcatcgccccctggaaccctttgcctttggaagtgccgatcacatccacccactgtccggcggaaaagagatccacaccgggatcttctgcgccttcagcaggcaattcggatgcttctacgcggaattccttgaggagtttggtaggctggatgcccagtttcttgaagtggccggcctgaggcttggccacgcggctttccttctgcgcatcaaaagcaacctggatagcattgtagccatccttgtcttccgttttaatctgagcgaaggtgttgcccttgacgtcaatgacggtcacgggaaccatagcgccggattcctggtcaaacagacgggtcataccgaccttttttccgataagtcctagagccattgtagtgtgtctttctgttttttaattacttatccgggtgccaaactagatgcggatcgtgatgtccacaccggccggaagattaagcttcttgagctcatcaatcgtgcgcgcggtcggatcgacgatgtcgagcagacgcttgtgggtgcggatttcaaactgttcggccgattttttgttgacgtgaacggagcggttcacagaaaacttttcaatgcgggtcggcaacggaatcgggccgtgaactttggctccggtgcgcttggcggtttcaacgatctcctgggaggagcggtcgatagcgcggtagtcaaatgcgcggagtcgaatgcggatttttggactttgcatggacgtgcggtctattggttatacttcaaaggtttgtttatttagccttctcgctgacaatctggtcaacgaggttctggggcacctgttcaaagtgggagggctccatggaataggaagcgcggccactggaaagggttcggatggcggtggaataaccgaacatttcggacaaggggaccatagccttcaaaatgcaggcgttggccttgttttccatgttgctgatctggccgcggcggcggttcaggtcgcccatgatgtcgccctgataatcggtcggggtggaagcttcaacggacatgatgggttccagcatgatcggcttggctttcttgaaagcgtccttcatggcgaagatggcagccatcttgaaagcgttttcattggagtccacttcgtggtaggaaccgtccaccacttcaacgtgcacgtccaccaccggataaccggcgacgacgcccgtggtcatggcttcattaagaccggcataaacggcgttcatgtattccttgggaatggcgccgcctacgatcttgttttcaatggtaagccccttgccgcgttcgttcggcttcacatcaatgaccacgtggccgtactggccgcggccgccggactgcttgaccagtttgccgtcgccatgggcaggggcagtaatggtttcgcgataggcaatctggggcttgccgatgtcggcttccaccttgaattcgcgcatcaggcggtcaataatgatttccaggtgaagctcacccatgccggaaatcagggtctggccggtttcttcatcagtcttcacccggaaagtcgggtcttcttcagacagacggcccagagcattggacattttttcctggtcagccttggtcttgggctctaccgccatggaaataacggtttccgggaaggtggggggttccaggcagatatcattgtccgggctggtgatggtgtcgcccgtggtcacgttgcgcagccccacgatggcggcaatgtcaccggagtacacggcatcaatatccgtatgctggtcagcctgaatctgaatgatgcggcccacgcgttccgtcttgcgggtgcggggattgtacacggtgtcacccttcttgagaacaccggagtacacgcggatgaacaccagcttgccgacgaatttgtcagcccagagcttgaacgccagcaccatgggcttggcatcgtccgtagcggtgatttcgaaggtcttttccggatccagcgtgctttccgcgtgggcgggaacggtttctaccggggaggggaggtaatccaccacggcgtcaagcaggaactgaacgcctttgttcttgaaagcggagccaccggcaacaggcacaaatttgttggcgatggtggcgcggcggatagcttccttaagctctttgggcgtgaagggttcttccatgagcaccttttcagcaagctcatcgtccacgtcagccacacggctcacgagttcatggtaggccagttcggcttcttccttgagttcggcgggaatatcctcaatcgtgtaggtggagcccaagcggtcgttgtcggcgtaaatgacggccttctggttcaccacgtcaatctggccgcggagctggtcttcagcgccgatggggatcagaatggcagcggcattcgcgcccagcttgttgtggatatcgtccagcacgttgttgaagttggcgccggtacggtccatcttgttgacaaagcacatgcggggcacgctgtacttggtggcctggcgccacacggtttccgtctggggctgcacgcctgccacgccgcagaacaccacgatggcgccgtcaagcacacgaagggaacgttccacttcagcggtgaagtcaacgtgtccgggagtgtcgatgatgttcagctggaaattttcgccttcgaacactttgctgataccttcattcttcacctgcttccagttggtggtgacagcagcggaggtaatggtgataccgcgttcgcgttcctgctccatccagtcggtcgtggtggaaccgtcgtgggtttcaccaatcttgtgaatcatgccggtgtagaaaagaatacgctcggacaacgtggttttgccggcgtcaatgtgagcggaaataccgatattgcggtaacgctcaaggggagccttgcgattgggattatttacgtgatcggacatagtgtctggaaagtatctgtagtgatcgaaagtgaatgattcggctgacagtcgcagaaggaattaccagcggaaatgggcaaaggcgcggttggcctgagccattttatgaacgtcgtcgcgcttgcgaacggaagaaccctgattgttggcggcttccttgatttcgttggcgagagccttgtgcatcggcacacccttgcggttgcgggcgtagttcacaatccagcgcatggccagggattcggaacgggccggatccacttcaagcggaacctggtaagtagcgccaccgacgcggcggctctttacttccacacggggtttggcattttcaatagcgcgggtgattacttccagaggatcaatgctgtccgtgccttcgttagccatgtcaatagcggcataaacaatgcgttccgcaagggagcgcttgccatccagcataaccttgctgatcagtttgccaacaagagcgctgtcgtaacgagggtcacgacgttcgatttttctataaacgcgtttacggcgagccataatatatagtaggtaagatgtttggtttacttggcagcagccttcggacgcttggcgccatacttggagcggccctggcggcgcttgtcgacaccgaggcagtcaagagcgccgcggacgatatggtagcgaacacccggcaagtccttcacacgaccgccgcgaacaagcacgatggagtgttcctgaaggttatgaccttcgccgccaatgtaggcgatcacttcttcaccattggtaagacggactttagccactttacgaagagccgagttcggctttttgggcgtacgggtcatcacctggagacaaacaccgcggcgttgcgggcagctatgaagagcgcgtgatttggacttctcttccggagtaatacgtcccttgcggacgagctgattaatggtcggcatgttttcctgctttggttgtggttcgtcggtctgatccgatattcaaggcgaacattcctttttataagcaggaagcgcgccttttttccggaggcaaacccgatagaaaacgtatttcttgtgcctttcggcacgtttggggacggccaatataacgtgattttatatcatgacaagtcttttattcatcttttcctaaatattttatccgttccattttccccgctcctttcaaaactccatttcgggctcccgggatctcttttcctccccgtccagcagttctccacctatggaggatgaaacaaaaaatcttcttcacaggcaaaaaaaaccatttcttcatgtccggtatgttaccgcagaaaaaaatgcatgaagtgccggagagacacaaaaaacaagcttcccatcagaattcacgaaatttttttcataaaaacggcagccggtctattatttattgttaacccgcctgctttcccatcttgccctgtccggaaagcatgacataaaaaaatccgtttccggaacgcatccggaaacggatttcatcaatgaactcagcaagccgctatttcccgggggtcaccagggaatgtccggacatttcggcaggctgtttcaaccccatcaggctcagcagcgtgggagcgacatctgccagaatgccatcggagagagttacctggtccttgtcgtccgccacgtaaatgagatccacaaggttggtcgtgtgggctgtattcggagaaccatcctcattgcgcatgtgttcggcattgccgtgatccgccgtaataagcagcttgccgccaagttccaacaccttcttcacacatttttccaaggcgctgtccactgcttcgcaggcggcgatgccggcttccacaaatccggtatggccaaccatgtccccattggcgaaattcatgatgaccacatcatacttgtccacagcgtccacaaacttatccgccacttccgccgcgctcatctggggcttcaggtcataagtagccacttcccggggggaaggaacaagaatgcggtcttctccggggaactgggtctccacacctccgttaaagaagaaagtaacgtgggcgtacttttccgtttccgctatgcggagctgggttttcccggcttccgacacaatctgcccgaaaatattgttcagctgttcctgttcaaaaacaatgggagagggatacttggcatcgtattccgtcaacgtcacatagtgcactttgggcgttacttcacggtcaaagccgtcaaattcgggataaaggaaagcgtcgctcatctgccgggcgcggtccgcacggaaattgaagaagaacaccacatcgttgtccctcacgcgctgctcgttgccataggcaaaaatgccgggcttcaggaactcatccgtctcccccttcgcataacactgctccacatattcggcaggggagcaggagcactgttcgccgcgccccagaacgatggcatcccatgccagcttgttgcggtcccagcgcttgtctcggtccatcgcatagaaacggccgacaaccgtggcaattttggcgccgtacggcctgacggcttcctccagctggcgaataaagccggctccgctggttggcgagcagtcacggccatccgtaatggcatggatgcagatatcgcggacacccgcttcataagcatatttgacgatgccgttcaaatggttgatatggctgtgcacgccgccgtcactcaccaggccaagcaggtgcagacgggaagaagcggcctgggaaaaagcggttttcagcacggcgttttcccccatggaaccatctttgatggcattatccacccggcagaggtcctgaaagacaacgcggcccgcgcccaggttcaagtgccctacttcggaattgcccatctggctgtccggaaggcccacgtcctccccggaagcgcccagcaggctgtggggatagttggcaaggaggtaatcagtaaaaggggtatcagccagaacagtggcgtcaccgtactctttcgcgacatcaggccccaacggattgcggccccagccgtcgcgaataacaagaacgacaggctttttagaagacataggctttatttacaggcatcccctccttttgaaaagcccgaaatcaggcattccctctccaattccgaaattgcctgagggttgccgcccttccccacacggacgactacatatcttcccttcatcaccggacgctcggaatgaaatacagcaaatttccattccagagaactggttcccaccgttcccaggcttaattctatgctcagccaatctcccagccccgcagagctggagtaatccgcctccacatgcacgcggggccatccgcagtctggggaaagaacatccaccccccgggaacgcaggtactcgtgctccacttcttccaccaaacaaagcagccgggagaagtgggccaccccggaagcatccgtatcatgaaaagctacctggcgcgttctgacaaagggaatgcagggaaaatcttcaggcatgccgtcatcctgccctctcccccggaatcatgtccagccgcaaatgcgcgacaatatgtcacatcagcttgatttgtgacatgccgctctttatatataagagcaagccgcacggcaacggacccgccgccatgaaaaaagacaccattgacaagctgatcggccgcattgaccacatcaaggaggaagacctccagcgcttttttgtcaagctggcggaacagcagggttttttccagcaggtatttgaagccattcaggaaggtctgatcctgctggataacaagggaaaaattctgttcgtcaacaaggctgcccttaaactctttgacaaggaacgtgggcaaataaccccggatgacttctgtattttcctgggcagggactgctcatgggacacgatccagcagagccagaccgccgtctcccgggacacggaaatcttttacccggaacacagattcctgaacatcttcatttcccccatcggcagcaaaaaccagggccacctggtcctgatacgggatgaaacgccccgacataaaaaaaacgcggaaaacattgaggcagaacgtctgaatgccttgacactgctggccgcaggagtggctcatgaaataggcaaccccctcaattccataggccttcatctccagctcctggccaggaaggcaaaacagctacctccaaagtaccggacagaaatggaggaattgctgaaaacagcggagagcgaaaccacgcggctggacgttatcctgaagcaattcctccaggccatccgccccaccaggcccatccgggaaccctacaacattgaaaccatcctcatggaagtgctgaaactgctggaaccggaaatccagcagcgcggcatccaaatcaacacagacctccagcccaatcttcccatcctcagcctggaccccgtccaaatcaaacaggtcttttacaacctgatcaagaatgcctaccagtccatccctccggagggaggcaccattctgctcaaaagcggttatacagatgacagcgtattcattactgtggcggataccggctgcggcatttcaccggaggtcatgggcagcatttatgaacctttcctgaccaccaagtccaccggctccggactggggctgcttatcgttcgccgcatcgtgaaggagcacggcgggtccatcacgctggccagccagccgggtcagggaaccaccatcacggtcttcctgccgcgcgtggaacgcaccatcaggctcctgccatcctccattccctcatgaagatgcctgttttgctgattgtagatgatgaaaaacccacgcgcgacgctctgcgcatgggttttcaggatgattatgaagtgtacaccgccgccaatctctcccaggcttccgcacttctgcaggaagaatctccggacctggttctgacggatctgagactgggtggggaaagcggcatggacgtgctgaaagccgctgcctccctgccccaccctccgcaaagcatcatgatgactgcctacggctccgtggatgccgccgtagcagctatgaaagagggagcgtacgacttcgtcaccaaacccctgaatctggatgccgtggagctggtgcttaaacgggcactccatacccggaacctggaaacggccaaccaggaactcaccacccgcatccaggcggactccggactgcaaaaactgctgggcaggtccgccgccatggaacacgtattctccattattcgtcaggtggcccccagcaaaacgactgtgctgattgagggggaaagcggcaccggaaaagaactcgtagcccaggccatccattccctctccggaaggccggaaaataaattcgtggccgtcaactgcgcggccctttccccccaattattggaaagcgagctgttcggccatgaaaagggctccttcaccggagccggacaacgccgcatcggccgctttgagcaggcggacggcggcaccatctttctggatgaaatcggggaaatagacgccggaacgcaagtccggctgctgcgggtgctgtctgaacggaccattgaacgcgtagggtccaatgcatccattcccgtcaatgtgcgcgttatcgcggccaccaacaaatcattgaaaaagcttgtgcaggaagggaaattccgggaagacctctacttccgcctcaatgtggtgcatattcagatgccccccctccgggaacgccgtgaagacatccccctgcttgccaccgcctttctgaaggaattcgccagggaaaacaacaaggaattcaagcccctctcccgggacgcccttgaagccgtccggaattaccagtggccgggaaacgttcgtgaactccgcacggccatggaacatggcgtcgtcatgagtaattccgccagcataggcctccatcatcttcccccgcaactgcaggatacttctccggaagccgctccacaggaacggccggaggacaatgcgcccaacacgcagaatgggcttgtcccggccggggttttgaatttatccttgctggaacggaatgccatccaacaagcgctggcccagtcaaacggcaataaaacggcagcagcccacctgctgggcatcagccggcgcactcttcaacgcaaactacaagatatcctccattcatgaatgagccctcctcggcatcccgcaccccttttatcattatccttatcctgctgctggcaatcacgggggtgcagtacctttttaactttaacgggctgggcactgatgccgccatggaccacgcccaaatcgcccgcaacgtagccagagggcaggggatgaccaccaactggctgaggcccatccagatggtctccggaagcacacgcgccggcctcaacccttttctttcagacgcccagatacatgaacaggaagccatccgggccggacaaggcgaaaccctcgtcgaaccggaaaaattcaatccctatgccctccgggacacacgcaacgctccgctgaacattctgacggaagcagctgtcttcaggatggccggcgtccacaaatttgacctgtggagcatgacgggcccatccatgatttacctgcctgaccgaattgtggcgggcatttcctgcatgtttttcatcctgtccgtcctgagctgctattacatccttctccggatgtttgacgtcaccatcgcctgcttcacctgcctgacgatgatactcagcaatcttttcctgcaatacgctaccagcggcctcccgcagatgatgatgctcttcttctttgcctggggcattcactttttgtacacggctctgcaaaacaaggaggaaaaccgcgcattcctgtggcctctcattggcagctccatctgtttttcatgcgtctgccttaccggatggatcgggctgtggcccatggccggttttctgatttttgcaggcatccggttcaaaccgcacggcctgtactgcattccgggccttatcactctccttcttttcctggcctaccccatttacatcaaccgctccctcagcggaggcttcttcggaacggcttattacaccatcttcacggggctgaccggcaatgaagaaatagcgatgaactctctggtttccggaagcattcccatcgctgcccaaaaagtagtcacttccgtcatcaacaacattctgacgcagggtgaccttctctatgaaaacctcggcaatcttcccctggccatggtatttctgctggcccttctgcataaattcaaacgtccggaagtcaaccagtccaaatggggcatttttgccatgtgggttcctgccgtcatcggcatggccatttatacctccaataaaaccggcatttccttagggcagattcaaatcctcttcgctccctttttcacggcctatggcacggcatttgttctcaacctgatagccaggcattccaacaaagagctaatctccatccttcggggaggcgtcctgctgatctccctgctcatcacttcccttccgcttctgctcaaccttccgcacattgtgcgggtgggcatcctgacggccagccgcggtattccggcatggcctccctactatccccagggccttaaccgggatcttcgctcccagacggcggaaaaggatttcattctcacggaccagccggccgccgtcggctggtatgcagacagaaaagccatcggcatccccaaaatggtggaacaattcatggtgctggagcgcattctgaaattccacggcggcaaggtgggcagcatcctggtgaccccctcgtccacatcaaaaatgaacctccgcaccattgcctcctcctacggagaattcactcccctcgtactggaaggcacggttctgttccagaccaaggataaaaatcccgtgtacctctttgaccacagtcaggcgcttgctcccctggcgcagcgcttcggaacgcccgattcccgccaattcatccagggagcggaaatgattctttacaaagaccttcaggaaaccgcccctcaaccttaatcccccatatggccaaacaacggaaaaacgctcccggatttgaagaatccgtagcacgcctggaagaaatcatacgcctgacggaagcacccgtcaccgagctggaagacatgatagccctggtggaagaaggcaataagctcatccgtcactgccgcagcatcctgcatgatgcggaactgcgcattcaaactctcagcaacccggaaaccgttcaggataaaacggatactgatgaaccagacagcaatgaattctccctcacctgaacttccggaactgctggcaagcatccgcagccacgcagacctgatgaaaatccctgagccggaactgcccaggcttgcggaagaaatccggaataccctcattcactccctttccctcaccggaggccacctgggacccaacctgggcgtggtagaactgagcattgcccttcaccgcgtctttgaaacgccgcgggataaaatcatctttgatgtctcccaccaggcctatgtccataaaatgctgacggggcgcgctcccctgatccacaccatccgccagcacggagggctttccggatttgccaaaatgtccgaatcccctcatgactcctacggagcggggcatgcgggcacggcgctttccgccgccctgggcatgtgcgcggccagggacctgaaaggggaagactaccatgtggtggccgtagccggggatgcggcattcacctgcggcactactctggaagctctgaacaatatcagccagaccaccaaacggtacatcaccattctgaatgacaacgaatgggccatcgacaaaaacgtaggagcgctggcaaaatacttcaactccctgcaaacatcggaaacgttttcctggttaagggataaaacggcttccttcattgaaaagctgggcggcacgcaggccagggactttgctttcaagctggaaggcaccaccaaaaaccttatcttcccgtccctgctgttcaacaaattcgggctgcgctatttcggccccctggacggacacgacattcccaccctgatacgcacccttgcctacatcaaggatctcaacgaacccgttattctgcatgtggtcactcagaagggtaagggctaccagcccgctctggacaaccccaccaaattccacggcctgggctcctattgcgtgagggacggggaaacgcaggccgtccccacccccacattctcccatatcttcggctccacgctggtggaaatggcgcgcgaggatgaatccatcacagccatcacggccgccatggccagcggcaccaagctggacttattcaaggaagccttccccaaacgctatttcgacgtagggatcgcggaagagcacggcgccctcttcgcctgcgggctggcggcggagggcatgaaaccctacatcgccatttactccactttcatgcagcgctgtattgacatgattcaacatgacgccgcgctgcaaaaactgcccgtgcgtttctgcatggaccgtgccgggctttccccggacgacggccccacacaccacgggctgtttgacattgccatgattcgcagtatcccgaacattgtcttcatgcagcccaaggatgaagccgaattcgtccacatgctccgaaccatgaaccattaccagaacggccccaccgttatccgctatcccagaggatgcggcgccggaacccccgcccccgccaagacggaaatcctccccatcggcaaggcggaagtacttcagacgggacaggatgtaaccctcgtttccctgggcaccatgatcggcatcgcccgggaaaccgcctcgctgctggaagcccgcggctacaccgtcaccctgatcaatgcccgtttcatcaaacctctggatgatgaatgcatccgccgtcacgcagcacgcagccgggtggtctgcaccttcgaagaccactccatcagcggcggcttcaactcagccgttctcgaatccctggaaaccggagatgtcaagacgcccgtggaagccatcgcatggccggaccaattcattgagcatggttcggaatccatcctcagaaaaaaatatggactcacggcggaagccgcgctacaaaaaatcattccccacctgaactcctgatctgtttatgaaaacacgcaccttcctgctggcagcccttgcgcttgcccttcttcccgtctccgcgcgacaatccctgccggcctccccttcccctgcctggattcaggaattcaacaacctgccggaaacaaccagaaaaagctatatagcccaattccgcaaagcggaacagctctttgcccagaaaagaatcatggaatgtcttttttccctcatggagctggaaaaactttatgccggaaatccgggcttatacaacctccgcggcgcatgctacattgaaatccgcaatatcgaaaaggccctggaaaattttgaaaaagcccagaaactggatccctccaacctcaccatccagttcaacctggcggaagcgcattacgtcaatcacgactattccagggctctgaaagctttcacggaactccttctccccttcaaggacaatcccggcatgacgcccctgctgcaattcaagcgttatatctgcgcccgcaaactggataaccagcctcttgccgcggaattggaaaagctgtacggcccgatggatgatacgccgtactactactgcacccaggccatcctcaaactgatggaaggagacaaggaagccgcccaggaacagcttctttccgccatccgcatctacggaggcaccagcgccatccaggcctttacggacgccatgacggaggcaggcatccttccctccccctatgggcaaaccgtcccaaccgaacagccggtaaaaaccggactggaaaaacgccgttaatgaatgcggaagcgacggtcctgaagctttatcccctgggagaaaacggcctgattgccgtctggtgcacggaagaaggccttatcaggacggcggcaaaaagcgccagaaaaaccggcagcccctttgccgggcgtctggacattttctatcagtgtcgcatgcagtggacgcaggcaaagaagggggatttgcacaccctgacctccgcagacctgctttcgccgcgcctggccctccggaaaagctacctccggctcagtgcggcaggctatttcgcgcgcctttttctccaaatgctggaaccggacacgcccatcccggaattttacgacttgctgcaaagggcctacacctacctggaaaacaatgatcccacgctacgcgccgtcctgcacttcgaacaggaactcgcccggctgcatggaatagcccacccaggcatcccggcgcacgtcattctgaaatcccacttcggcaagcttccctcgcagcgggaaaaactgctcggaagcctggaacaaaaagaaagttgagcaacatgcctgtcccgcttccatcctcagcaggggatgttccctgcccctgctcaacacgtctttcctccgggacggaatgcgcattgttccgtgcgcgagattgacttgtccgcagccttcaggcacaatacccggcacggttttactgcatgaagatccttgacagatacattgcccgtcagctgctgggtgtcacggccctgggggtaatggccctgagcgccctgctccttctgggcaacctgttcaaggaactgcgtcccctcctggtggaaaacaaggctcccatcagcatcgttctggaattcatcttccaggtcatccccttttcgctgatgttctccattccgtggggattcctgacggccgttcttctggtgtacggtcgtctggcctcggacaacgaactcacctccatgcgcatgtccggcatgagcctgtggcgtctgagcacccccgccatcgccatcggcatcgccctttccggcctttgctactggattaacatagacatcgcaccgcgtgccaagcagtccatttccgagctgctcatcaaagccgcttccatcaacccgaaggggcttctcaatgaaggccaggccattaccaaattcgacaacctggaaatctacatcgacaaacgcgtggacgacgtcatccacggcatgcatatctaccagaaagcggacgaaaaatccccgtctgtggccatgcactcggaacgcgtgaccatggatttctctcccgagaaaaaaatcctcaccctgaatctcatcaatcccctcatcaccacgcaggaagaaggctccatctcccaaagcgtgaccatggacgagatgcctctgagcatcaacctggacaaatcccgctcccggcgcatcaaggccaaccgcttcaccaaccgggaaatccgggaagctctggacacgcccggctatctggataaaaagcagaccacggaattcgccacggaacttcccaggcgcgcctccttctccctagcctgcatcgtctttgccctcatcggcgtgccactggccatcaacacccgcagaaaagacacttccacaggatttgccctgggcatcctgatcgcctcactctacttcctggccctgatctttgcagacttgtcccggaaaaacgacacgatgctcccctatattctgctgtggcttcccaacatcatcacggttgccgtggcgttgcaccttcacaaacgggccaggcacaagggataagccccctgcggaagcccttcccgctggcgtggaattagctttcacagcatgggagcttcgggtaacatgatgtgcatgcagcacgtccccaccatcgccatcgtaggcaggcccaatgtcgggaaatccgccattttcaacagaatggcaggcaggcgtatcgccatcgtgcatgatgaacccggcgtcacccgcgaccgcctttccgccccctgcaagattacggaccgcgcctgtaaaatcatggatacgggcggtatcggcgcgcgcctgagcgacggctttgcagaacaggtagaggcagaggcggacattgccataaaaacggcggatctcatactcttcgtgctggactgccgggatcaccttacccctatcgaccagaacatcgcggaccacctccgtaaatcggacattcccgttatcctccttcttaacaaagccgaccacgaaaaacaggaccttaatctgggcgaatttaccggactgggttttgacgaccatatctttctttccgccgcccacggcagaggcttttccgaattagcctcccggctggacggttttctcaagcagaaaggggctccgcttaaagaagaactggaggaagaaccggaaaacggagaggaaacggcccttcccatcaaggtagccgtagtgggacgccccaacgcaggcaaatcctccctggtcaacgccatcctccgggacaggcgcaccatcgtctccaatgtggcgggcactacccgtgacgccattgacatcccctatctgcacgacggccagccctacgtgctgattgacaccgccggcatgcgtccccgctcccgtcgggacacctccgtagaagttttctccgccatgcgcagtgaaaaagccatccgccgggcggatatctgcctgctggtcattgacattgcggcgggcatcacgcagcaggaccgccgcattgccggcatcattgcggaggaaggaaaaccctgtatcatcatcgtcaacaaattcgacctcttccatccgaatgcctcccgcaaggaccgcatggcggaagtggaagaacaggtgcgcagggaactattcttcatcagctacgcgcctttcatcgccacctccgccaaaaaagcggaaggcgtggaaatcatcttcaaagtcatcacgcgcatccgccgggaatcccataacctgcccactaccggccagctcaaccgtctgatccagcttgcccagcagatgaatccccccggcgccgccagcggctctgccagaaggttgaaaatatattacgccaccacagcggtggaccccaagtacaatactattcccgtcccgcgctacgttcttttcgtcaatgacaaaagcctgctcacggacagctattcccagtacctgcgcaacaaaataagggaagcctaccccgctcccggcattccggtcatcttctccgcccgttcacgcgtgcgcaacgactgatcatccctccttctccgcatgctctccgtcaggaacctcagcgcctccttccacaccagggccggcattgtccgggcggtaaggaacgtgtcctttgatgtagccccgggggaaacgcttggcatcgtgggtgaatccggatcaggaaaatccgtcacctgctactccatgatggggctcattccgatgcctccgggccgcattgaaagcggttccgccatgctggacggcacggatctgctccgttgcccggaaaaggaactccgggccatccgcggcaaacgcatctccatgatcttccaggaccccatgacctccctcaacccgtacctgaccatcggggagcaggtggcggaaccccttgtcattcacgaaggggccggcaaaaaggaagcgcgggtacgcgcgctggaacagcttgctctggcaggcataccggatgcggaacagcgcatggacgcatatccccaccaattctccggcggcatgcgccagcgcgtgatgattgccatggccctcatcaccaggccggaaatactcatcgcggatgaacccaccaccgcccttgacgtcactgtccagaagcaggtgctggatctcatcagaaaacttcagcaggacatgggtacctccgtcatccttatcacacatgacctcggcgtggtgcgccaatacgcggaccgcatcaacgtcatgtatgcaggccgcatcgtggaaagcgccccggcgaaggaacttctggaacatccccggcatgcctacaccagagccctgatgaaatccattcccgggctgcatgcgaaaggcgcccccctctataccattcccggactgcctcccaacatgactcaggagccatgcggatgcagcttccgccccaggaacaccctcggaaacccggcactctgcctcacggaccgggaaccggagctggtggaaatatctccggggcactcagtccagaactgtccgggctgtctggcttagtttcctttcctgtttgctcgcagataatgctgcgtacaggaaaatccttttaactgaattgatttccgcacaattcttccagaatgccgtaaaaacggcccacatgcactccgtccaccagcacatggttcgcctgaatggctacgggcatcaccatcctgccggaaacatcctcctccaccttcccccaatggataaggggaaagtattggtcccggaacaccctgtaggcgctggccacctgtgtgaatggaatccacggcaggcagctgaatacggcgatatccgccctatggcacggattcgcctgggcgggagcaagtttggccgcctgcacaaggggaacggcatgttccagaaaatcaggcagccccatccggtattccactaaaatctgagtgaattctccatctgcagccagcaccggaaccagggcattcacggactcatactcccacacctccccttcctccacccgctggcgcagctggggaaccctgttcaacgccttcagcagcacaaacaggcacaaaatgaaaaaggaaactccctcccgtttcgcataacggtacagggcatccacccggaccggggacgtaatggaaaacatggggcagtcaaacgtccggaaatactcataatgggaccttcgaggccaggaagcgatttctattttctttttcatgcacttattttctattcagggaaggctccccgtacacgttttcgcgttgttgctccggcagcaaaaaaacaggacagaagcagtcaaagcaacaatattccccgcctctcccggaaattccagcccggctgttcccagcgccaacgcattgattaatgcctttatttatccaatcatcaactatgttgcaataaagaacatcctgaatgctcctacccctcgcgaacggaaagcaaatccgtcacggacgcatgcttcatgcgccacgcaggcagaagacacgccagggaggagaggacaaacaccagaagcacagcacaggccagatgcgcccagggcattgtgacaggaggagtaacgatgccgaagtggtaaccgtattccagaatctgaatggagcaccaggcgccaagcactcccagcgcaagactcatgacaacggcgcacagggaaaccatcagcgtctccgcccagagcatccgcatcaccatgccgcccggcacgcccaccgcacgcatcaatccgaattcccggcggcgggactgaacggaagccagcacggtgttaagtacagccagaacggcgatcaccatcatgatgatgggaagcttgctcatcgtaaaaatcacatcgtccccgcggctggtaacgcttcctcccaggctttcccgggtcagggccttcaccagaggcttggcgccttcccctccgttttcctgctcccgcactttcatcagggcgtattcccccaggtcgttctgaagttccacattgctgatccccggagcagtatccccccagataaactggaatccctgatgagcgtattcctctttgagccagcgttcatcggcaatcgccaaagcggcaacaaaacccccgcggcgcacgcgcattccgctggtcttggtcaaccaatgccagccggggaaggaaactattcccgccaccttccagggttctccccgtacggcggcccccctgccccggccgcgaataccggcagagggctcatttccggaacggagttcccgggaagacggattaaccagcatcaagtcatccccgaccttcaaccccaccgtccgtgcaaacgtatccggaatcaggagagaacgggtggattccagcatggcataagcctcctgcggatttccggaaacaaacacggggttgaacagcggatggctccccccggccatctccgccacgggaatgccggccagtacgatggaacggttgcgcatcccggaaaaaccggggcttttcatctgtgccggagcaatatccggttcatccacgtagatgggatacattcgggaattccgcaggctggggcgcgccatcagctccggaacatccgcagatttgaactccgtatgcaggaaggaaaccagagttccgggtgttgacgtatccggggaaaaaggaaccagcatggaatagccccatgtctgcacccccacaaaaagagagaggcccacagacatggatacggcagttcccacggaacggctgaggttgcggctgagctgcattttcaggaaagaatgcggaacgtgcagcagaaatccggtaatccatgccccggtccactccgtcacgcgcacgaaggtgggggccagaaacagcgcaccggctaccagaccggggtaacccagccagaaaaatatccatttgcgcgtttctacctccaggcccggcaacagcagggccgcaggctgaagacacacgcatgcgaggcccgccacgacagaccacacaggaacacggctcaccttcccgatgaatccggaggaaggaacggccgcttccagcggagactggcgggaagcgcgccacgcaggaatgatggaagccagcaaggccccgcccacagcgcatacggcggcggttaatactgtggaccaggtcagcacgggtacagaggcagagccttcctccagcaggtacaccaggaaaaagcctgcggccagccctcccagcaatgccggaatgcacagaaaaatcccctctcctgcaatcagcagtgcaatttgcatgcgccccagccccagagcacgcatcagggccagtctgcgggcacgttcgctgacgccaatgctcagcgttgtgaaaataatgaaaatacaggaaaacaggacaagccagacagacatttccgcgctatccttctgtgaacggacggaccgatcgctggaaagccgccggatgatggaatccgtatccgctaccgcagcggaagcctggaccagctcctgccggaaattctcagtaaattcctttttgtccaccccttccttgagctgaacgtaaatcaaattgggggcaaaaggctgccccgtaattttctcgcataccttcacgggcacaaaaagggaggaaaaaaccgggccggacatgccacccggccccataatgacgccgggggtggccttggcctgcttgacgatgcccacaatctttacgtcgtacacatgcgttcccacgcgcacgttcatgacagtccccactcccgcgctgaaatatttggcgcttccgctgcctagcaccccctccatggctgaggaggaagccatatccggccaaactccctctttcaactcataaggacactccacagcatggtttcccaccaggatggggctctggggaggaattcccatgcggtcgcgcgtctgctcgtcaaagctgccccgctcatttccgcagccgatttggaggcgcggcacctggcacgcggcgttcaccgtctctacaaggggagaggcggccagacgggcgggcagctccgggtcacggaactgcgggtactgtccgggaggaaggggccctttgggagactccggcaccaggcagaggtcataattccccatataggcctccgcatcattgtcaaactccctgaccagcgtatcatagctccccatcatccatacaatgaggctgacggagacaaggatggcgaacacgctgacagccatccggccggggttggcgcgcagatccctccaaatcagtttgaacatcaacgtcataagacatcattcagcgtacgttcatagaaggaggacaattccgcaggaccggcaaattccgctgtggatctgtcgtccacaatactgccgtccttgagtacgactacacgatccgcccacatggctacgtccggcgcatgcgtcaccaggacaaaagcacaaccttgcgcacgatgcaaatcccggaacaaatctcccataagccgggtattttcagaatccaggttgcccgtaggctcatccgccagcaccagagcgggaccggaaaccaatgcacgggcaatcgctacgcgctgctgctccccgccgctgagcgtatccggcatggcatgccgacggtgagacagtccaaccttttcaatcatggcgtccagggcggcgggggccaccctcctgcctcccgccagggacggcaacagaatgttttcctccacgttcaaggtgcccaccaggttaaacatctggaaaatgaaccctacacggtcccgccggtacaccgtcagggaggcatccgacatggaaccgagatccatcccatccaccgtcaccgtgccggaatccggagccagcagccctcccagcacgttcagcagagtactttttccggagccgcttgcgcccatcacggcgacgaactctccccggttcacggtaaggctgatatctttcagcacagttatactcccggaaccggatttgaaaccgcgcttgagatggctgacggaaatgacgggggaactcatggcggaaacgcaaggttaaaacgtggtcttcaggcctacttcaaacgtgcgcggctctcccaccgtgcactgcacggcatggcgggtggactgcacgtactttttatcgaagatattatacacagccagcctcagcgtggcatctttcagccatttggattccggcagggggatttccaccgtaaagtcgaatacgctataggaggggatggtgtagttgtccgcaatttttgcgccccggaacgtagcgtagtaggaatccttgcagcggtagcccaggcccagcaccgtaccgttcagcaaccctccgtcaatgcggtacttctgccagagggccagagcattcggagcaatcgtgggatacacttccccggtggtccggttcttggtgcgggtgtaggtgtaggaaagataggaactccaattcttggttatttccccgttcagggaaagttccacgccttccgccctcttggagccgtccgaatagtaccgattggtatatccgtctatggcaacaggcgtattattctggatgatgtcaaaccaggaagcggaaaaccacaccttatcaaccgggctgacccggaacccgaattccatctggtccgtacgccaggaatcggtcaattccttcccgttttcatccagatacccgaagttgggggcggacgtacgggctgcattggcgaacaacgctacgcgctcgccgaacatgcgggtaattccgaagcgggggctccatgcaaacgcataattattatccaggctgaaatgcgcgtcaccgcgaacgccggccagaaaacgccactgtccataactgaggacatcctgcagcagaaaaccagccctctgcaccacggtatccgtcgcattggcgccggaataatcgcgccctgcagggaaaaaaggaggaggattgtacagggaaaaatagccgttcgtgtttgcggtggcgtttgtcaccaggctggaaccgtctccataagtgctgctccccgtgtaagaaacgcccatcagggcttcatgcttcacctgcccggtcttaaattccgccagtgcgttggaataaaaattccagttgatattccactcgtcgctccaggcggcttcatatttggcctttccggaagcaatcatctggttgtaataatccgccgtgctggttcctctcccagcggaagaggaaatgccccagacattatagtccacatcgctgtacccaataccgccgccaatgcggatcgtccatatcttttccagcttgcgttcgaaatccagcatcgccagcagggatttggaattaagccttccgctcggagaaccgtaccaggcgtcatacggccccacaaaatggccgcccagcacagggatgcccatggtcgtcggagaattctgatactggaaactggtcgtcagcaccgtcttggtgcgggaatcatgctgccagcggaaaatgggggacaccgtgtacttctggcctccgttggctccgttgctcagccagaacgggcgttcatactcggcggctaccaccgtgcgcagggcaaatccattcgtttcatcccccctgtaccgggtatcgtcaatcgttgcgcggtatttctgcccgtgatgggaaaggcgggcgtaagccgtcaactccgtccgttccaggaaatcaggctccttcaggatcaggttgatggaaccgccggcgccgtatgccccgagcgtactggtctgaccgccggaaatggaaccgatggggcctttgacaatctcaatattttctatcagggacgtatccatgccataccccatgcctcgcgggaggggcatattgccgatctgaacatcactgccggcaaagccgcggatggtgtactggtccgccgtacgggacaaaagcatgtccccacccgtattgacggaggaatccatacgcagcgcttccaccagggaatcggaccccttggaatccatcaggtcccttgtaatgacgtttaccgtttgcggaacttcctccgtcttcatgttcgtgagagtagcggaactgaccgtttccgcccgcagggacctggaacggatggtcatcacgcgttccggcatttcctgcacgccttcctctgcggcggcggcctttgtctcggcataggcagattgtccgagaacaagcaggctcccaatggcggcagcacggtgcaggccgcgcccctggcggcgatggcggggggtattcatgttggataaacgcataggggcaagtataggacggaacaaagaaccgtccattcccgtttgttaacaatttgataacagaccgttccttttccttccggcaaaagcgcatctgatggcagaacggccccgccctttcacaaacccaacgcctgcgcccggctctccgccgcagccttcagccattcccgcaatgcctccttatcccctgcggccagccaattcctcacttgtcccagctgggacagggcttcatccagacgctccagaacagcaggggcattttccgccagaatttcagcccacatggacggttcccccatggaaacgcgggtggtatcgcggaaacctccggcggataccagccccagcagctttgtatccccaccgtccagagcgctgtggacgcacagggcggacaaagcatgaggtatgtgggaaatgcgtgccacggaagaatcatgatccgccgctttcatccggatgcagtggcagcccacacgctcccagaaccgctggagcaacagcagcacatcttcatgcacatgctcgtcattcgtcaggatgcaggtcgcatcccggaagaggtccccggaagcatgttccataccctgcttttcggaaccggccatgggatgggagccgataaacgccacgccggctttcttcagcacggagcccacggcctggtgaacacaccccttcacggaacccacatccgttaccagtactcccggtttcaataaaggaagcatgtcggaaacaaggcggggcatcacgccaaccggggtagccagcacaaccaaatccgccccttccaccacctcctccatccgggtggaagcggtatgggcggctccggaagaacgggcatattccaatggttcttccctcctgccccacaagctcacgtgcacatgcggcaactgcttcctgacggccagcgccagggacccgcccagaaggccggggccgagaatggcgacggaggagaaaaaaagctgctttctggaatattctctcatggatttacaggggaatacatcagcgccccggaacatcggcatgttcaggggcgcggcatgatctcgttgcggcggccgcatcagggcacgcggaacttcttaatctcgttggggaagttggtgtcccgcaataccgtcccggagggatacggcttattggtgctcctgttcaaaatcttgatcttcttggtgcggtcatacgggctgaccaccaccgtgggatccgccgtaggccacgccaccggtacggaagaagaagcgggaggttctactggcctgggggcggcaatgccggaaccggcggaaccactcacgggattaggaacgacgggcttgggcacaacgggagccggaggcgtgatattattggcccctcccaccatattgccgatggtcccggaattggtccgggcggggtccgggttaaaaccggaattctgcccggccatcggatccagagaattttcacgctgaatatcattcagcaggctatcgccctgggcgcccacagcgccggacggatagacattttccgtaggataaatgccgatggggcgttcattcacgcgctccgtttcacaggaaggcagaagaatcgcacctgcggccagcagcacgcctatcgtcggggaagtattcatataatctctcttcgggtgatagctttctgccagcatcctacggccccgcaacctcatgtcaaccataaagcctgtttgccgaacctcttcatgacaaggaatctccggcatccgctcccgcacgcgggcaaagctgcccggacatgccgcgccggcctccgggacatcctctgcccgcccccttcaaaaaaccggaaaaaacggttccccctcctcccgggaacacgcctgtacgggaacagattatccttccctacaccccatgatctgctacaatccgccccacatggatgacgtacagacatctaagaaaaaaatgccctcaaaaaaggaatggaggggattttattccctgattctcattcaagcccagaacgctttcaatgaaaaagccgcccagttcctgctgattccgctgggcgtctggctggcttccaccaacgccgcatacgggccggattcctgggtcaactccctccagtacattctggcctgcatctttgttctgccctacattctgttctcccctttcgtcggatggctggcggactgtttctgcaaggcccgcatcattcaattcatgtctttcctccagatcctggtgctgggagccatgcttctgtgctacaaatacgaaaacattgaaatggccgttttctggttctgcgtcttctccgtccaggcgaccatcctgagcccggccaaaaagggagtggtcaaggacatggtaggctcccggcagctgggctacgcttcagggctgatggagatgagcctcatcctgtccatgctggcggcccagataggcatcttcgcctggttcgacatcctgcaagtctcctccaacgacggctgggaagcagccgctttccccacattcatcctcacctgcatcgccgttcccgtagccattgcgtccctttacctcccgcggtatccggccaaccagaccaggaaattcgaatggaagctcttttacgaacatttcgtgcagctcaagtatctctggagccagcgggacttgaggctcagcgaaatcggcgtgtcctacttctggttcctggccggcgccctgatgctcatctccctccaaatcgcccaggaacaccccattgacggtaccggattcagcatgtccgcggccattctcatggcatggctcagcggcggcacggtggtaggcggcgtcatcgcctccatcatctgccgtaaaaaaattgaactggggctcattcccctgggcgcgatcggcttcactatcgggtgcatattcatgtccttcttcgcacccggctccctccccagcaacatcgggttcggcatcaccggagctttcgccgccgcgtatctggtgccgttaaacgcccaccttcaggacaactgcgacccctccaaccgcagcaccgtcatcgccgccggcaacctgatggactgcctgatggggctggtggccgtcggcttccagctcatgctcaggaatatcttctccatccagaaccaattctgggtgctggccgccctgggcgtggtcattaccattgtggccttccggcttattccccgtgaattcatccgcatgatgggcctctggatcatgaggattgtctaccgctcccgcatcatccaccaggaccgcatcccggaagacggcggggccgttatcgtctccaaccatgtcacctacggggatgcgctgttcctttctctcatctgcccgcgccccatccgatttatcgtggcggaggaattcgtagccatccgctggctcggctggattctggaactcttcaactgcctgcccatttcctcccgtaatccgcgggaatccctgtccaaggccatccaggccctgaaggccggagaagtcatctgcatcttcccggaaggccagctcacccgcacgggaaccctgtgcgccgcgcgccgggggctggaaatgctggcgaaaaaatcgcgctgccccatcgtgcccatttacatggacgaactatggggcagcatcttctcctactcaggcaaccgcttcttctccaaggcgcctctccgcgttccctaccgtttcaccgccgccatcggagagcccattgagcctgacgccgtcaatccccgcatggtcatcaacacgcttcgggagctatcctccacatgcctagaaattgcagccagcatcggcagggatgccatcctgaaccatctggagcgcatcgcccacaagccgctggtcttctctaaaaacgcgcggctctccgggtatgaaatagcggaatgcctgatgaacgataccgtggaagcagagcatccggaactcagaaaatggctgtccaccctgctggacagcacccgctcccaaagccgcctgtgcgacttctggatgaacgcccagcagctggaacgggtgaactccctccagccccgggaattgctgctcaccagcataggacgcgaagaggtccacgaaacggtggccgccgtcctgtggcccatcctcaccagcactcccgtttacctcatcagcgacggggaccacagcatgccggaaggcatcaggcagatagccggttccgatttcctgcgccgcaggctctacagcctggttccaaatacgcgcacgccgttttatgacttcagcggctcgggcgacctggttctccccaacatcggctggcggccctgcttcgccacggaccgcggcattatcctggccatgtccatgaagagaagcgtcttcaagctggatgacggcaccgttcagctcggcatgagggccaggacaagaggacgcctcctccccggcttttaccagaatccccctctttccaacgtcatcgccggggccaccctctccaccccttattccctgccgcccaacctgtacctggacgagtcgggcttcctggcggaactccagtcttccaaccatgaacaataactcctcgtcaacccgccttcccatcccgcagtatgtaatgacgctggcgcacgcggcagccctgcggtcggaggacccgtaccgcaaggtgggggccgccgccctggatgcggacaaccgcgtcatcggcaccgcttacaacggactgtatcccggattcaaggctcaggacaccttctgggccagccgggaagaacgccagaaatacatgctgcatgcggaaatcaacctgtgcagcctgttccggaggggggaagccaaggtggtggcatgcactacgatgccctgtacttcatgcatgcaggcgctgtgcgcccatggcgtaaagaccatttattactgtgagccttatgacaaatccgaagctcctgccatcgccagcctttacggcgtggaactgatccaggttacggactatccgctcagccgacacttcccccttgtcctggacagctgatgcccggaaaatcaatcccggtgcacacggcatgtccaaccggccatggggcggggaacgccgtcaatggcaggatccaaatcaagcccggtttccgtaatggtgcccgaagtaatgacgcccgcattccgcccggcgtcgtcaaaggcaatgttcacattcgccatggtacaggcggagctgctgttggcagccggagcaatattcaatacgccggcattctccccgctattaaaccggtacgtataaaccccgtcgtacacggctcttgtatccattctgataacatccacgtcctgcccgctgaactggagctggaataagatgcttcctccctcaaacaggcttacctgctgtccgctcagggaagtgttcccgtcatctccagactttcccgaccctcctccgcatccggacaacaatccgcacaccgtcacaggaatcagcaacaagacagggaacaactttttcatccccggaaaaatgcacaacataaaactataagtcaagtatactcaactattatttcatttttccaacatttttaacatcacaaaaaaaaccgcctgttttcacaggcggtctcaagaaaacacggaagcgatcagccaacccatttccaggtaatgggtatttcaatatcagggtgcaggctgtgcttgaccggacagctcagagcagcctgttccagcagcttcctgtccggataatcggacggaagaggaacggtaatgacgacttccagcttgccgatacggcggggatccgcattcatatgcttggccacttccaccgtcatgccttccagatgaatccccttacgttcggcaacaatacccatgatcgtgctcatgcagccggcaagcgccgctcctaccaggtccgttggggaaaaggactcacccttgccgttgttgtccacgggggcatccgtggaaagcgtggccccggaaggttcatgaaccatggaacaatggaggccgccctcgtacgtcgttttagtttttaccatggccttattttatacaaggctccccgccatgcaacacacaaacattgaatccccccgttctttatggtaaccgcctttgctatgagaaactttttgaaagcagccgtcggctgcctgggcatgatcgccgggtgtttcagcacgggggaggcccaggacttcggaggaatgagcttcggggaagcgggaaactttggtccgccccagacatccggttcctccaaggccactgtcacctcctatggagaagcctccttcgtcatcgtgacggagctggcgctgccggaccactggcacgtttactacaaaaatccgggaaccgtgggacttcccatggaagccgccttccagcctgtgcccggcttccgggtggaaggccccttctggcaaatcccggaactggggaaagggcttgtggatttttacggatacagcgggaaggctaaaatggcgttccgggtaactccggaaaaggatgcccccccggaagcgatgttcaccaccaccatgacgtggcagatgtgcgcggaacagtgcgccgccccggaaaccagaaacttcagcgtcacactgaagcgcggagacgggcagacagcccctgacgcggcggaattgaccgggaacatggcagggcttgccgcccccgactgggcggaagggctgaaagcccggatttcccaggaagggaaaaccgtcaccctgcacctcaggacaaacggacgccccgttccgcaggattccgtctattttttctgcaatcagggggaaatcaaccctaccactccccaaaccttcaaaaaactggatgactccaattatgagctgtccatgcaattcaatgacaccacggacggcctttatcccaacaacctgccggacgcggacaaagggaaacctctgaccagcctttccggcatcctgcgcgccggcagggaaggcatcatcatcaccgcggacgaccgccccttctccggggaatcccaggcaacagccgccggaacggaatccgccccggaatcttccgcttccatccccgctcctccgctgatgggcctgggggaaatcatgttcttcatgttcatcggcggcatcatcctcaatgtcatgccgtgtgtcttcccggtaatcggcctcaagattatgggattcgtccagttaggagggggggaacggaaaaaagtcctggcccactcccttaccttcgtactgggcatcctgatttctttctggatcattactgccattctgattgcgctgaaagcgaacatgtttgactggagcgccccagccggccccggcgtattcagcggagacttctggctgggccgcggcgcggagggcgttgtcaactgggcgttctggtttgaaaacccctgggtgaatttctgtctgctgggcctgatgctcgccatggggctgagcatgttcggcgtctttgaaataggcgtcaaagccacaaccatgggcaacgacctccagcaccggaaaggttatgccggctccttttggtccggtgccctggctacggtcatctccaccccgtgcagcgctccgttcctgggccaggctatcggcgcggccatgctccagccgcctctgggcatcgtactctgcctgaccatgatggggcttggaatgtcccttccctacatcattctgggcgcctttcccgtcctgaccagatacctgcccaaacccggcgcatggatggaatccttcaagcaggccatgtccttcctgatgttcggcaccgccgtctacttcctctggatttacatagccttctttgatgctgaaaaccatcctcaggacatcctgttcctcttcttcgggctggtgctgttttccatggccttttgggtatacggcagatggtgccccatgtaccgcagcagaaagtcccgcatcacgggaggcatcttctccgtaatcttcctgctggccggcttgtactacatgcttccgccggaaggagcagcctggttcggccgcggttccgctcccggggcggcggagtcctccgctgccgcagcgccctccctccaggaggaaggaaacatctggataccctggagcccggaagccatgcaggccgccctggacggagggaaacccgtttatgtggactttacggcccgctggtgctccacctgccaggtcaacaaggcctcctatacggatgaagtgctggccgctttcaaaaaatatggcatcgtcatgatgaaggcggacaagacccgcacgaaccccgccattgaccaggaacttaaaaacctggggcgcacggccgttcccgtcaatgccctgtatcttcccggcagaaaacccgtcgtcaccagggaactcctgtccccggcctacctgctggaattcctggaaaaggaaatggaacgctaggacgtcttgtcatgcggacggcaatccgccgccctccccccaggccatgccgggcagcaggaaacggagaaaacttacccttccccgttcaacagcggcagcaacgcgtccgcccatgcctgataacccttctccgttaaatggacatgatccctgaacatgccctccctgaacgtcccgtccggcttcagcaggctaccgttaatggacaaaatagtggtcctcggaagctcaagcctgcgcagtaaacggttaatctcctcctgcctcctgcgcaacgggctgccgggatcggagccgtagggagtcacctccatcaggatcaaacgggtctccggaaacttcttcaacaggcgtacggctatctcccggatgcccttcaccgtctgcgccgcggcttgcctccccttccagcggccgatattattcgtcccggccagtaaaacgcaatagcggggggaagtcttgaccgccagtttcgtatcctccatacgccacagcatgctgtccgtcctgtccccgctcactccgaagttgaccgccttcatcggcagaaacagcctcttccacagcgcggcaccttcccgttcccagcattccgtaatggaatcccccacgaacagaatgccgcattccttccccagcaaattttcccgaaccgccctgtaacgggccggaacccacggctgggtattcagtttgggaacatcgggcggatccggagcctcatcagcaggagccgcatacacggcagaagaagcaaaggagagcaataaaaaaacggcagagaaaacagaagcattcatctttttccgaatacgcggcccggaaaagcattctttcccctgccgggaaaatcatgttctcaccgccttgcccaatacctccaggggctggccggacaaattcaattcctttaccagaaaacggacaatcagcaggcttgccagcgcatcatacaaagcgtcatgccagcggcgcgcaggaagcaacgcctccacggaacaggtcaaccccagggcgccgcacaaagaagacagggaataatcctccagaccggggacgcacatcctgcccaaagccagcgtatccagccacggaccgaagccgtggcctggaaaccgccgcaggaacttccgttccgtagccggattatgccccaccaccacggcctgccccaaccgggaacgtatctccggccacagggaaggaaaagacggggcatccgccagcatctccgtagtaatgccgtgcacctgggaggcggaccataaaaccggcttctccaccgcaatataggaagtccacaactcaggttcgtcctccaggcgggaacatgcggctatgcctatctggacgggctggtccgtctccccccgggccgcgccggcggattcaaaatcaatggcggcgaaacgcaggccgccgattgtatccgaaagcggaggcatatcagaacaactccagctgagcatattccccgacaggcatatcatcgtccatgtccgtattcttggctctcggttccgccagccgggagcgcccctttttcctggggcgcgtggaattcatctccagatgggacaggatggccttggcgcggtccacaatgacggcaggcatgccggccagtcgggccacctgaatgccgtaggacttgtccgccgctcccggcacaatcttgcgcagaaacacgatttcctccttccactcccgcacggccacattgtaattctgcacgccctgcctggaattggccaaatccgtcagctcatgataatgcgtagcgaacagggtgcgggacttcagctcgtcatgcaggtattccgccacggcccaggcgatggaaagaccgtcaaaggtggccgtgccccgcccgatttcatccagaataatcagggagcgctccgtagcgttattcagaatcagggaagtttcgctcatctccaccataaaggtggactggccgcgcgccaggtcgtcgctggctcccacgcggcagaaaatgcggtccaccaaaccgatgtgggcggcttccgccggcacatacgctccaatctgggccatcagcgtaatcagggccacctggcggatataggtgctcttgcccgccatattgggcccggtcagcagaataaggcggttttcctccggttccagaaaagcgtcgttgggaacgaacacatcgccggaaacattctgctcaataacgggatggcggccattgacaatgcgcagggtcatggaattgtccagaacggggcgacagtaccggtactgctgcgcgccctccgccagtcccagcagcacgtccagatccgccatggcgtccgccgtcatctggatatcgtcaatgtggcggcccacttcctcacgcaacaggaggaactgctcatactccacctggcgggaacgctcgtccgcccccaggatggtattctccatctgcttgagctccggggtaataaagcgctccgcgttcaccagcgtctgcttgcgctggtaatccgggggcactttatcgtaatggctcttcgttacttcaatgtaataaccgaagacgttattaaagcgaattttcagggaatcaattcccgtgcgcttgcgctccttctcctgcagccgtgccagccactccttcccgtcgcgggaagccagccgcaattcatccagaccggcgtgatacccttccctgatgatgccgccctccttgatggtcacgggcggttcctccaccagggcgcgctggagcaaatccaccagctcatcaaaacagcccatgcgggaacggatgctctccagcatctccccgccgccgggcagggattccaaatcatccctgagcgcggggatgcgcgacagggaggaagccagcgcctgaaggtcgcgggcattcccggcgccctgggaaatgcgccccgtcagccgctccatgtcccgcacattcttcaggctctccctcagcttgctcatcaggtagggctcctgcagcagaacggcgatcacctcctgcctcgccagaagcttttccagatcgcacagggggtggagcagccagtcccggagtttgcgcgcgcccatgggggtgcttgtcctgtccagggttcccagcagggaaagcttcacgccgccgcgggaatccaccagatccagattcctctggctggcctggtcaatcagcacggcgttctccgtggcgcgcacggaaatgcggcgcaaatggtccgtagggcggcggagctggtagctcagataatggagcaccgcgccggacgcacccagggcggcagtcatctccccgcagccgaagccgtccagggaatgcacccggaaatggctcagcaaattgggaatggccgtggaaggcagaaaagtatatccgtcgtaataaagcgtggggtgggttccggggaagcagtccgtctgctcgtcgctgaccaggagttcggagggattgatgcgggacagctcgtccagaagcaaatccatgtgttcgaactgggccacggaaaattcccccgtggtatggtccacgcatgccaggccgaagcgcttcttgtccctgtacaacgccacaatgtaattatggcgggaggaatccagcaaattcatatccgccagggttccggcggaaatcacgcgggtcaattcccgctccaccagtttgcccggctgcggaatggtggtctgctccgcaatagccacccgctttcctcccttcaccagccgtccgatatacccttccgcgctgtggtggggcaccccgcacatcggaatgccgtggcgcttggtcagcgtcaggcccaaaatggcggaggcctccttggcgtcctcaaaaaacatttcgtaaaaatcccccagccggaaaaacagcagcacgtcttccggcaagcccttcttcatgcgaaggtactgatccatcatcggggttgaggcaggtccggaactactcataaataacggtgaaagagtaatccgattgcggcttcaaggcaaggttggaatcttgttagaaccggggctccactccccttttccaaggaaaagccagggaagaatcatccaaagccccgcaaagaaaatgcgttgcctctgccattatcgcgtcttttctcttcctctccggaaacaggccctcatgcggaagaacccggccatgcagactgccatctttttgcgaagcgcggcaaacaacaggccatttattccagaaaagaaaaaaccgtgccgcaaccggatgcggcacggtgtgaagtcagattggaggaattaatattccaccacgggggcatccttccacagggtgtccataccgtagaattcgcgcgtttcctgccccatgatgtgaaccatcacgtcaatgtagtccactacggaccacaatgccacaggcgtatcttccacataggtggggagggctcccgccttttcccggacggcttcttccagctcccggatgacggctcgcagatgggggacggacaaccccgtgcacactaccatgaaatccgtcagggaagacatgccccgcaagtcgtacacccgcacattttcggccttggcgtcatccgcggcgcgggcgcacatcctggccagttccatcgcatcgttggctaccatattcgattcgtttctattgaattatttcttttctccgccgtccttgccgaactcatcaacgggattgtaggagaaggggtcccgttccgcctgttccagttccccttccatcttccgttcttcagcgccgtccgcgcgggtctcttcagcttctttcttctcggtatggccggaatcatccttcccgggctgttcctccacttcggaaggcatggggggcggagtcaccctggagggagggtttttcatttccccgtattccagaatatccatgacctgggaaccttccagcgtttcaaactccatcagggcctccgtcagaatgtccagcttgtcccggttttccgtcaggatggccatggcgcgttcataagcgctgtccaccaggaagcggacttccgagtcaatcagctccgccgtggattcggaataattgcgggaacgcgtccccaggtcgcgggcaatataaacttctccctggtgttctccgtactcaatcagccccagtttttcgctcatgccgaattcgcacaccatgcgccgcgccaggttggtggcgctcttgatgtctccggtagcgccgctggtcacatcaccaaaaacgatttgttcggcgcagcgcccgcccatcgccacgacgagctggtccagcatttcggaccggagctggtgcatcttgtcgtcggaaggaagccacatggtcatgccgagggccccgccgcggggaacaatggtcacccggtgcagcggctcgctgtgcggcgttttcaacaggcagatggcatgccccgcctcatgcacggcggtaatgcggcgcccccgttcgttaatcgccaggctgcggcgttcacgcccccagctgaccttgtcgcgggcttcttccaattcggcctccgtaatctccttcagacccttgcgggcggccaacagggcggcttcattgaccaggttggccagctgggcaccggaaaagccggacgtgccgcgggcaatccgctcaaagctgactccgggcgccatcttcacttttctggcatgcacctgcaggatctgttcgcgcccccggacgtccggcaggttcaccaccacctgccggtcgaagcggccgggacgcagcagggccgggtccaggatgtccgcacggttggtggcggcaatcacgattacattggagttgttttcaaaaccgtccatctccaccagcagggcgttcagcgtttgttcccgctcgtcattgccgccgcccatgccgtaaccgcgctggcggcccacggcgtcaatttcatcaatgaaaatcaggctgggcgccgtccttttggcctgttcaaacatatcgcggacacggcttgcacccacccccacgaacatttccacaaagtccgagccgctgatggaatagaaggaagcgttggactccccggcaatggcacgcgccagcagagttttgcccgtgccgggcgccccgaccatcagcacgccgcggggaatagtggcgcccagatcgcggaatttttccggattgcgcaggaactccaccagttcccacacttcctccttggcttcgctgatgccggccacatccttgaacgtcaccttgttcttgtccggggagatgaggcgcgcccggcttttgccgaagctcatggccccccgggccccgccgctctgcgcgcggaacatgaagaacagaatcaccagaatgagcacgatgggcagcagattcagcaggatgccgccccaggaaccggattcacgcttgaacttcgtatccggccccagaagctgcttgacgcggtctccctggaactccagggtaaaaggcacttccacgcgttcaaaacgctgcttgtccacggaggcgtctcccgtagccgcgggccagatgcgggtgacaatctgtccgaccagcacgttctggttgccgtcttccgccaggatgatgccgtcctttcctccggcgatgcggccttccagggccaggcggttgaattcaggcacggaaagcttctgggctccctcaggaatgagggaaacattctttccctcttccgtccggtacgggctctccaccaccctgtagccggaaagttcattcagcaaaggcttgtcgcggtccggaagggacatggaataagtcagcgcaaagggggtcatttccaccttcggctgaatttccttcctgtacaccagcgcgtgaataacgccttcggaaccgttttcgctcagcaccacttccacgggggccttggggtcgttcagcaccacgcgccccgccttatactgggcttcaaaggattccagattttccttgcgggggcccaacccgaaagattcaggggtgaaaaagccaaacgcaaggacgcctacaatgagaagtaccatgacccacacgccccagttgggggattcgggcctgccggagccgggaaatttgggaggacggggaggactgggtggcattctgtcagacataatgtggttagcacacagaagttaatgaatagggcggcatgatacgcgagtccttgtaaaataaaacttttttccgagacatgccatacagccgccgcaggacgggcccgcaccgttccgggccggggctcttcccggcaataaggccttaaccggcgcaggcctcattcccgctttctttttctgcgccgcccctcatggttcgcgctttctccgttcatgcgctgccggagacgccgcttccactggggcatcctttcttccgccggggccgcatgggaaccggcatcttcccggctcttttcctgccaggccccctcctcctgcgcgttcagccgctcccgccgcctctgctcctggatttccgccaattttctggcgcggcggatttccacccgcttgctcacctccccgtgggcggaggtcacgcgccaggggccgatgcggcggggataggtaatgggcgcgcaaaccagttccgcatccagaaaacgcatggaccccaccagcaggttcttgacattcgccagcaggccgccatccgtccagacgccgcccatacccatttccagcagaaaggccagatgcagcgtctccgctcccgaggcctgaatggaaaaatccctcagggaaatgccctccgccggctcctcgtccggagcggccacggaagcggcccggaggaggaacatcgtatcccggaccttgcggctcagggcgcagaccagttcccccaccttgggccgggcatcaaaacggtaatccttcacttccaccagccacagatcccggcgttccggatgatacagcagaaaatccatttccttgcatcccccgcagaaattctgcgcctgccgggcataataatccgaacattcaatgcggcacaccacgtagccttcatcgatccagaaacggtggacgccctccacgtaataagcttttgacggcttatgactcataactcagcttcaaatacctgtccgcctgttcgatttccgcttcaagagactcgataggccccacgtcctccagggattccccccaggacacccttaccccggaacgttccccccgcggcacgctcatcccgaaaaactttctctgcaccatggcattgcggggttcggaaagctgaatcatcagctcccgcagcaggaacaggctgtgggaggacaaaataacctgcacccccgtcttggcaagccccgtcagggttttcaccagcacgggcaggtgggaggcgttcagattcatttccggttcatcccaaaacaggacggaaccttttttcacggaaccgttccggatcaggtagctcagcgttcccagccttttgaatccttccgccaccaggctcatttctatcggctgctgtccgggacgctgcaaaaagaaccgcccgtcacgcttcaccaccttccccccgatgattttttccagcctggcaaccacgcgcccggcatccgtactgatgggctccgcttccgcctccatatccagataacggcagaggtcccaactgccgccgtccagaaattcggggaatctgcttcccacctgcacaaaactcggataaatggtcagcacctcccgcgccgccaggaacaccaccggcacgttcagaaaacgccggggcatttcccggatgctcagcccctcctcttcatgccccgcctggaaatcaaacaccaggttccccatgccctccggcacgccgtccccctccatggaggcctccacgcgcgcatgggcgtttccccggttccgggccgtcagcccggccagcccgcgggacgcgaacacccgcatcaggtcttttctgagccgctgctcctccgcccatttttccggcagggattttctccccccgtcagcgctccacttggccacggtatagcataatttcagcaaatggcttttgccggaatcattgcctcccaccaccacattgattcccggaacaaactcaaaatgctctctcccgggaaacaccgtcacgccgctcaccagtaggtcatgtatcataccgttcccaatgtagcacagaagcgcaggccgtaaatgacaaaagccgccagctgccggccaccggggagcctgccggaaaaacaccggaaacaacggggaaaacgcctgcggccgcagcaccgccccatcccccgcaggttccggacatacccggaaggcggcgcattttaggcttcccattgccgggcgccttattaaagtaatccgtatgagcgcacaatggaccaccgccagggaatacacggacatcaagtatgaaacaacggacaacggcagcatcgcaaaaatcacgatcaaccgcccccacgtccgcaatgcgttccgtcccctgaccgtgcatgaaatgctcaacgccctgaacgccgcccatgaagaccccagggtgggcgtggtcatcctgaccggagaaggcccggacgctttctgctccggaggcgaccagaaagtgcgcggaaatgccggctacatcggtgaagacggcgtgccgcgcctgaacattctggacgtgcagcgcaccatccgcaccatgcccaagcccgtcgtcgccatggtggccggatacgccatcggcggaggtcacgtcctccacgtcgtctgcgacctcaccattgccgcggacaacgccaaattcggacagacagggcccaaagtgggctcttttgacggaggcctcggctcctcctacctggcgcgcatcgtgggccagaaaaaagcgcgggaaatctggtacctgtgcaggcagtacgatgcccggcaggcgctggacatgggcctggtcaacaccgtggttcccctggaggacctggaggaggaaacgctctcctggtgccgccagatgctccgccacagccctctggccctgcgctgcctgaaggcatccctgaacgccgactgcgacgggcagatgggcctgctggacctggccggcaacgccaccctgctctattatatgagcgaggaagcgaaggaaggcaaaaacgccttcgttgaaaaacgcgctccggatttttccaaattccccagacttccgtaacctcccccacctccgcaccatggcacccagctccgacaatgaaggcgccccccggaacggcaccgccggcagggaatccctgcgcgacctgccggaacatgaaaacatcgtggagcatttctacgatccggaagatcagggctcccgggaaaaacccgtccgtgaaaaaacgcctttctccctgataggcaatctcatcttcctgctgaccatagccattctggccgctattgcctggctggtttactcctcctggtgcccgcagaaaacggacgacctgcccggcttccgccaaagggaaaacgccccggatatccccagaatcctgaaacaggccatcaacagggacgcctccgtctcgttctcggaagaagacatcaaccgctacctggcttcctccatccatccccagcagcacggcgccctggccatcttcgccaccaacccggcggccggcatccgtctgcacggcggcaaggaacggccggacggaaccatcggggaaggatacatggaaatcatcatcgaacgctatacgggcatcgactcccgccagacgatttccctgttcctgacgcccttccaatccctggacccgcacaattacatggcggtgcagacccgcttcgaattctacaatgacgaaacgctgccgggaggaatccacgtggggggcaccatcggcagcctttccgttccccagggttacatgatttttctcctgcccgcgtttgaaaacctgctccaggcctacctgccgcttatccacatgattgaagaaagcggcatgggcatccatatcagtgaaggcaggctgaacctgacgcctccgcaaaagcgcacgctgtagcggaagaccgcagggccttccgcaatcaccggatgccctgccgggcaatgcccccttccggccccggcattcaatttttctccagatccctgaccatcaaagtcatatactcctcaggccaggaatgggtaatctgacccgcatcattgaaaaccgccaccaggcggatggaatccctcccatctgaaagcaccagcacggtttcatccttttcaaaatcataacggggcttgcccaatttgaatgccgcactcctgcggtccgtcctcagccacgcgcgcgcctgctccatcgtcaggccacgcagcgcccgggcatccctgaaaacgcgccgcgccgcattcatcgccgcagggctggaaaccaccatgccgtcccggaacgggcgggttccccacatgcggtcaatatcccggtccagcgcgccgcccatccccccggaaaggaaaaacacggctgcgggccaagccaggaaaatacccgcagcccatattgccagccgtttgcggcttctggaaagagccgctattccctgggctattttcccccatttttccaccagttcccggtccgcatgcccgaacaggaaattcacctgcctgcgttctatgccgccccgcagttcagccaccgtctttcccttttcgggcgccagatcctccagcgtggggcttccttccacgaagtggcggaaaatcctgggccacagcacgggaataaccgcaaaccggattgcaagcaaaaccaggctgcccaccaggcagccgcttatcaacagaatgtcaaacgaacggctgaaaaaatagtccggattccacatccagataaaaggagccgccagatacatccccagggaaaacaggcaccatgaccagactatggcggaaaaacggctggccgccacaaccacccccagcaggaacaaaaaggcccccagggcaattccccacggaaacgccccgtaaatggcggccggaaaagccagaatcatcaatgccatacccgcgggctgccgaactttttgcatatccggaacatagcacaagcccttgaaagcatcaagaaaggaagcccccgcagtcacacagggcctgttcatcctcccccgccttatttcagccagccatattccatgatgagggccgcttccacctccgcattcttggaagcctcattatccaggtcagcatacattttcctgatatccttcctctgttccagatattcatctccggaaacggataatctggactccttgaacgcaatttccttcatcagcaccccctgccagagctcaaacctcctgcggctctccagcaacgcggctatcttgatgcgccgccgctgcagttccatcaccacttcgcgctgcagcagttcgtggctttctttggccgacttatactggaaccaggatgtcaggcgcgtatccagctcttcccgcaggctcatgttcaccttcatatcgcccgctcccgcaaaaaaaccgccgtacgtcccgcccgtgctggaaaacagggttgggctgtaaaaattaatatccacggacgggaagaacttcaatttggcattcaacacctggaggcgggaagcttccagctccatggccaccatcgtcaccaccagcagatccaactggcgggacgccgccctgtacctgccccagtccagcctgggcatcgtttcaggtttcaccagccaccgggcgtccatattccccagcagcacggcaaaaccctgggaaatctcattcaaattccgttcccgttccaggtccagcttctttttctggacgccatcatcgtcataaggcagggagctcagctggttattgtagctgatctgcgcattccggtaggaaagcacctgctggtacaatctggccaccagctccctttttttcatctccagcgtcttttccgccgtataaacagccgccttggcggaataataatcgaacgggatctgggtgagggacggcatgttgaacaggatgttcgtgttgtattccacatcgctggccgtcaccttggccaggtcgctcaattccttggtcagcatccaatccagattgacgccggggattatctgggtaaaaacattgatgacggaacgtttcgtcgtcttgagggactgctccgattttttcaagtcgatgttccgctccatcatcatcgccagggcctggtgccatgaaatttccttccgcggcagctgccgccaatcgggaacggcatccatcctggccatcaattcccccgcctttttttccatgtgcctgtccacggagcaggaggcgcataccgtcgcacagaggcagaagcacaacgcagtcctcagccatgccctttcaaacagggaaaacaggaaagaacggacaacaggaggaaacgggaacatacaggccccttgttacatagcttctgcccctgaaaagtcaagcatcaacacggcaggcggagaaagaaggaaaaaagaagtcctggagcgcagggaattcggtttttcctttccccgtgtaaaaaatacctccctcctgattcctatcttgacaaatcatgtgtgatatcacagtttatcggaaaattattatccttttatgatgcgtcctttttttacctctttgtccgcggcctgctgctccctcggcattcttacgctggcccaatgcggcggaagcagttccgatgccgaaggcctggcgccctccaccatcggcagcaaagtgttaaacatgcaggtaacaggcattacggatgccgccataacgcttcctgccatttttgacatgaccaccggtgacaacggggcgttcatcatccagacgcaaggggaagacatgaacatgtggaacggggcaggcatttattcctacaccaaaaccgggaaaaacaccgcggagctgatcctgtcctacaacagaaacagcggttcatcctcggaacccaacaccctcatgagcaccatcaggattccccagttaacttttgagaacgccacccatgcttcttccggggaaggcggcgccagcatttcctacatgcaagcgcaagacaggacgcccatccccatcgacggcatcaccatcagcgtcaacattatatcccagtcataaataaattctttcctttatccatcaaatcatgaattcccgcctttacattcccgctttaattactctcgggcttgggatcctctccggctgcggcggatccagttccagcgaacaggcctatcttcccaccggccttcagcgcacgttggacattacgcttcaggacggcaagccttacgtcttctccttcatcatcgcctcagaaagcaccgccaccatttacaccggaaccagcccggccgcctcaacggcatcccttcatgtcgtcaactacaagccttcctccgactctgcggaacagataggcttctactggtcgtccaatgacggggaaacaaccaacaatctggatgccctcgtcgtcctgtataatccccagaatatctccaaaggcatcggttctgccacctgcagcgtcagagacgccgaatatactgaaacagaaacccagcaggataactgccaggcggtcatcagggatttcagagtatcctccagctcttgatcaataagccctttcttcatacctcccttcctgctcccatggcgggaagggatttttttaccctgatctctcctgccggaacagagacggactttccctcccagaccgccggcaaaggcggacatgccggaacgcagacaaaaccgggagcagcccccgaagctccatcacttacttgagcactttccctatggggcggcaggcggaaaaggcaaccggaatggaggaaagcagaacacatcccgccagggaaattcccagcagccacaaatcctgccgtatatcggcataagtcaggacggagtttcccagcttaaaaaattcccccaaaacgattctctgggttttcataaacgcccagacggctcccgcaaaggaaacgccaatcagaaatgcgttttccacgataaacgccataatcagcagtacaggacgcaccccgaagctcttcatcagcgtatagacatattcattctgacggaattccatggatgccaaggctgtaagcagaatgccgacgatcaccgcgataccgagggaaaatcccgtcctgcactccgtctggttgcccatcagcacttccagcctgtcaagcagccctacgtgagtctgaaccatggtcatgctgccgtcataacgcaccatgttgttcagcacttcttctatgtcccgaatgcgggccgccgtcatttcatgcacccggatgatgtagcggcaattttccacgggaacctcctgtccggaactgaaggttccttccggggccaaaatgactccggaaggatacagcctgcccagcaaatgcccctccggcagaggggaggcattcagggaaaaatcaaaatccgctatggtaaccgtacaaggccccgcctgcaacgggctccgggagggattgtacaggaggacggtagccacgtcctccaacccaagcgcggaaagaaaggaacaggactccatgttgtattccaggatggggaatactgtcttgcccacgcgcgccacgcccgcacgggcatcattcagcaccaggacgtcgcagccatacagggaaggcagttcatgctgcagcaaatttttcttggaaggctcaccgtcgcgcacggtatcaaaaacaataatcaggtccgccccgttcttcctgatttcatcatgcagcattttggcggagaggacataattggcgagaaaagagagcgcgcacagggaaaggaagaaggccaccagaatccgtgaaagggggctggccgggcgttccttccaacggtggagagtatctttaaagagatacagacaggttaaaatccatgatttcatgagtcaggtcaaacagccgggaatcatgcgtgctcaaaatgcaaattttgtcagcagggtactccctgatcaaatttttaatgatttccgtattgccgtcatccaagccggaagtaggttcgtccagcagcagcacatcggaatccttcatcatcgtgcgggcaagagccgcccgctgggcctggccgccggacaagctccccgcctttttatgcctcagagattccaggcccaggcgggtaatcaaatcatccgccctccgcgtccactgctttttaggcagcatggccatttccgcgcacaattgaaggtttctctccaccgtagccaggggaaggagattaagcccctggaacatgtagctcacctccttgcgccggtagagggaatccgccgggaccttccggcggggagtaaccacgcgcccgctctgcggcttcagataccccgccagaattttcaacagagtcgttttcccgcatccggaataccctttcaaaatggtgattccggaagtgaataccctgttataatcttcaaaaatccactgcttgcctgaataactgaaacagactgattcgcacagcaatttcatttttttcgaacaatcaattccgtttctccattcaccaccagctccaggtccggatgcactttttcaagaagttcctgccaggacgaacattttttcccttccggcagggaagccagcctcaccttgttgagatgaaacacttctccctgcggcatgtaataaagacgggccgtgcagttggaacccagcatcgaatgggcgcgtgcatgctcctgacggggcagacggaaaaaatacgccagcaattccccgccgccggaaacattcttctccacccgcttgaaggcaaaaacccccttcagggcggaaccgtcgcccagagggacggacagggaaagggattccggcggcagattcgtcaaatcagggtccgaaatggaaatggtcagataataagaggagtcatcgcacacggtcgcaatcggggacgcggcatccatgtacagggctacgctgttatccggcggaatggaaaactggtactgcagtttcccgtcaaaaggcattctgaggatatatttttcctctttcttgcgaaaatccagacgcggcttgtcttccaccagggacaactcctttttagaaagctcaatcttgtctttcaatgcccggatggccctttccccgccttccgcctgcttgctggcatattgccgttcctccctcgtcagggaagagtaaaactctatctcttcaagctgtttttccagctttgacaactcttcctctttggcgatgcggtccttcagaatttttacttccagctccttgcgctccagttcaatttcatcttcattgactgttgcaataatagtatccttctgaacgcgcccgtccgcgggaatccagttgctgacaattccatccgccggcatgacaaaggaacgcagcctctccgggacaatcttggcgcggaaagtcttgataaagcaggcatcttccgatgccgccataccagtccccccgccggccgattccgcattccagacacaaagagccagccccgagcacagccagatgccccaaagacatttctttgcccttccgaccataatttcaaacaggcctgcctccatttcacggcagcaaagccccgtcataaatgatcagaactcaggataccgtgtaactcaccgttccttccgtagcggtccagtcctgcgcttcaaatccgccttcatcattctgaacgggaacctggtaagtgatggaaccggtgaacgtcccgccgcagctctcacgttcattggaggtgttgaaggaaatattagcatctataaaggccttgtccctgtttgtcacgacaatcgggcccggagccgtccactgcccggaagtaatcgtgaagttccccctcagaatagcggatgatcccgtcctgcggtacactacggaagcaatgttcataggagcgctttcattgctgcttgccgcgttaatgcttacctggggaaggtccgaaccattgcccgtcaatttgacgataatattccacggccctagcccatcttccgtggaaagagaagcgctcaagtccagcatggtgccggaaggaaggctttccccgtcaccgctgctgccgctgcctccgcaggaaaagagtccaagggacaaagctgccgcggaaagggaagataatacgcacctgttcgtcaatcgggaaaacataaagaaaaagattttcttcaaggatagtgattccgtccggcgcgtcaacacataaataaaagaatatttggaggggccttccgtttttttgcgggatgcaccggggcttacggcccgctgccattccccggacgcgcacgccggattttccgctttgcggcggaaaatccagacgccaatccccgcaggccgcaaacgtcatccggccttttccagcctgcgcttgaggacgcggcccgtgaccagcaggggggcagcccccatcaggaacaggaacagggaatccttccatggggtgggaaccgttccgtcatcagcgctgtatccggaatcccccggggacaggccggagcctccccagggcagaggctggcggcgggccagaaaaatttccggcctgtccagggcatcccggctgacacgctggatttcggcagattcatccagcatcacaacgcggtcattgacatagaaggatttgacggacggacggtccttgcccaggagttccaattccgcaatagtccgcctgtagcttttttccgaaccgccaagggcggccctcctcacctgccggacagcggctttggcctgttccggcccctccgctccaatagcggcaatgtggagcagcgccatcttgagcagcttgaattcttcaaattccctgtcgtccagatgagggcgttccttcaggtcgtccactttctcctggatggtttcacgctccctctcccatacatttttggacgcctggtccaccaccatcgtttcaaaagagtagcgcaaagggcagaattccgccaccagcggcacacgccccggcttaagacgcccgtgttcatccgtacggtgggcggaccatgggatgaactggttcatttcatcaaagcggacaatggctccggccatcaatatctggggaatcagaagcagaggcaccatgttaagcgccgccctctccgtcctggcgaagacggaaaccagcagggacaggctcacgccgacaaaggccgtcagggtcatcgtccccaggtaaatcaggaacatttcatggatttccagaatggagttccccacccaaagaaacagggcggactgcacggcggaaagccccgtcaacaccagcgcctttgccagcacataaccggtcacaaataccttggcattgctctccctcttgagcagggcacggtccttgagcacttcgctggccgccccggtcaggccgaagaacatggccacaatggtcgccaggaacaggtaggaagggatgtggagggccgtggcaaacgtatattccgggctggaagaggcgcgcagggtcatggaaatcagcagggccagcaccggcccttccagcagcatggtgtacagccccatacggctccgcacgcgccccaggaaggtgcgcacggcccagatgcggaaaagccgccagagctgtatgacgctgcgcctgggggcggggggaaattccagcgtgccttcatacagcgttctgggggcgcccccttcatgatgatgccccatcacgttgcggaaccggtagccttcaaagcgctcctgccacaagcgggggtgctgccgcctgcggcggtcgtgccaggagaggggggcttccagcacctcaaatacgtagtccgcgcctccggccgtccgcgcctcctcggagacgtcaatggccatgtccgcagccgccttccggaaataccgcatcatgcccggcacgtccccccagtaagccatctggccgccgtggtccagcaccagcactttgtggaactggttcagaatagccgtgctgggccggtgcatggtggcgattaccattttgtcgcggctcatgttctgcatggtctgcatgaccagcttggcatctgacgtggacaggccgctgataggttcgtccagcaggaaaacatccgcaatgcctgccaggtcaagccccaggttcaggcgagtgcgctccccgtcggaaatggtgcgggcgttcatctcacccacgcggcgggaggcgatgtgcgtcaggcccaggaatttcaaaatagcgttcacgcgcctgacgcgttccgaccggttcagccgcggacggcgtatcatggtggcctgagagatgtgctcggaaacgctcatggccgcatccagaatatcttcccggggaatgaaggcgatgtagggccggataagatccggggcgctgtacagaagctggttgttgtaacgaatgcagccccgggtgggcggcaactggccggccaacatggagagcagcgtgcttttcccggacccgctgggccccaggatgcacaccatttccccgcgtttcacggccaggtcaatattgtccagcacgcgtccggagcgcaggaattccttggtcaccccttccacgctgagggttctgatcgcatggtattcttcatccagcaccccggcggaaaaacggcagcgcagcgcgtggtaggcattcaggtgcaccacgtccccatccctcagggaaacccttccccgaacaggccgcccattgagcagcagaggcatggaggcctccaccacttccagccagccggaattggtggcgctggaaaaagaaacctccagcaccgctccgggggccagcccgggagtcagcagcatgtctcccttgcgcgccttttccggcaggttggtcacccgcagcttgcggtttccgggatccaggcggaaacggcgcccgatgtccgacatggaattctgcacctcccccatggagaaaggcccttccccgtccagcgtgaaggaggagtaataggccatgcgcacgctttcaccggggtacagccgtttcccgtcaaccgcgaattccacttccggcctcagcacctccacctcgcacgccagccccatgttcacgcgcacctcgctggcgcgggaacgcacccggctgatttgcagggagcctccgtccagggaaatatagcatacatcctgcttgcctgaacgcttgcaatccagaaaaaacgcgaagtcttcaaaactcagcggaccggacggcagaagcaccacctgcccgttggtcaatggcatcaccccgccgggctgcaaatgacgcccgcgcaccacaatggggcgggtgccgtcattcaccaccagcaccaaacgggaacaccggatcaggcggaaggaaatgcccttatcctgctccgggagggatacctccgcaccgatgccggaggaaaaaccgacgctgtacgccggttcctgggcctccacgtccggtgtcatcagcagctgcctcaggtggtttgccgtgcccggcagttccagaccgtacgtcacctggtcaaacagatcccctgtcatgcgggcatctcccgtattaatcagcagggagagcacttccagagctatcgccatgcgttccgtctcatccctgccggaagctgcggaggccaggacatccgcaactgtcaggctggccctcatggaccgctcaaaacggttggaaagccagcggtgctccacttccgggaaagtatagcgcagaatatccagagcggcgtccgcatcacgggcgctcaaatggcggcgtccgcttaaaatagtggcgaacaagtccaccagcgttccggcatgaaccttcatggagccgtcgtcacggcgcagccacggcacgtaggcgcccagcgtcctgaccagattcagcctccagtgaatcagcttggaaggaatgtcaaaaaaccattggatcatgcctggaaacgcgttgccggaaccagtagtacagggattcccgccccatctcaagcgcaaccggaatttcacggagaaatgacaatattttctacagctttatcttgcaataggtctggaggaagtatagttctgtccaatgttcatgctttccgcgtgaaagctagccaaatacatcaacattatcacaacatggatattttagtttctactctttgtgacttcgccgccgactaccagggcaagctctgcatccagggcggttttgactccctggttgcccgccagttcccagtcgtgcatcccgtctgcgccgttgccctgcgcatctgcctcactcctgaagacgaaggcacgcacgaactgggcctgagcatcgttgatgccgacggcacgccgctggacaaggaacgtatgcccatcaagatcaatttcccggttcccgctttcccggaaggggcttccttcttcacccgcaacctgatcatgaacttccagggcctgcgttttgaaaaaccgggcaactactccatcgacctgacggttgacggcgagctcgcctcccgcgtgcctttccgcgtggttcaggttcaggaagaagccgcacaggcttaagcaacctcccctttccatcaaaccgcctaccgttcatccggcaggcggttttttattggagcggccgtcctcccggaagtgcggaacaggtcggccccggttccatgcacctgaagacctctgcgcctggccccggcctaaaaaagggaggccggctttttgcgtcctccttccccctttttcattgcggttccgcaccggattgaccatgatacgggctgctccaacccgccatgtacaccgcacgcctccaatacgacaggattatcattacgggcgcatcatccggcttcggggaagcgtttgccggaacgctggccccccatacggcggaactggtgctcatcgcccggaatgaagcagccctgcgccagcttgccgccgccctggaaaaacgccatcccggccttcacgcctccgtccttccctgcgacctggcggacgaaacctccctgaatacgctcatttcacgcctggacagccttcctccgggaagaacccttctgattaacaacgccggagccggtgattacggagattttgcggacggccgctgggaaaaaatacgttccttgctgcgtctgaacgtggaaagcctcacccgcctgtgccatgcgctgatccccgtcatgaagaggaacggaggggatatcatcaacctcagttccctgggagccctcctgcccattccggattttgccgtttatgcggccaccaaggcttatgtttccagcctgtcggaagcgctgcggctggaactgcgcgaacacggcatccgcgtgatggccgtctgccccggcccggtttccacaggcttcgggaaagcggcgcgccgccccggcttcaccggaaacatgatgccggggcgcaatgcttttgacacgtccgttgaaaccgtcgtgaaagacagcctccgcgccctggcccgcggacgagcccgggtctttcccggcatgaaaatacggctggccgccatgctgctggctgccgccccgctggggctgatacgccttttcatgggcagacgtccccggaaagtcctgccggcatccaatgattctccttcttcagcatcatgaaagcgcaccgccgcggaataccccgcctcacctggttcaagctcgcagtctgcctctgcctggcagccatggctgtctccctgttcacgccgtaccccgcccagatcatacgcgccctgaaaggggagccggaacaggcgccgccggattccggaacctgtccgccccaggaatccccccccgcggaacagcccgggcaggaagaacagccaataaccgctgcgccatctgcctccggaaaggaacccggggatgaacggctgtacactccatggacgccggagcgcacaatcgcccttcccccggtgcagtaccccccatttcctcccgtgcttcccacaaggcccgcggaaggggccatgacccatatttatgaactggcccgcggcctgaacctgaaaacgcaggttaatttccaacccggcaccctggcctccagggacagggaaaccaaaagcaattaccagatgaccctttccctgaacgtcaaacagcccaaagcattgacgaaaaaggaagacattctgaagctcaatccgaaactggaacccatgcttcccggcctgtccaccctgttcaggcatgcgcgcgtctccccttattacgggcaggtttacgtccgcaaacagacggaaatccgtaaaaacctggcctccctgctcaaacttctggaccgccataattattacgatacggagaccattctggaaaccgcctatccggacacgggaaggaagcttctctggctgcaaagtgaaatggatgttgtttccgacggctcggacggggaccggctggccgccatgccggataaaatcctgaaaagctccttctatcagcccagcacttcctaccgctggaaaaagcgcacagacaagcccaatcccctgctcaacccctggcagcagaggctggcctcctacaagaagacgctggaaaaagcccccgccgcggaaaaaacggctctgcgccgcaaaatagaccatgcggaacgggtcattgaggaactgaagcggtacagcttcctgatctcggaatacgatccgttcatcgtggttccgctgggagtcgtcaaccagtcctctcccttctccccgcagttcggggactatgccgtcgtcatcgtgggagacaagttgtacccggccctggtgggagacgccgggccgcgctacaaaactggggaggggtccctgcgcctgagccgtgaaatcaaccccaaggcgggcccttacagccgccccgtctccgacctgaaggtaagttacctgatttttcccggttccgcagagcctgaggccggcccacccgactatgaaaaacttacggacagatgccgggaacttctcaacgaaataggcggcatggggaaaggattcaaactccaccaatgggaagacctgctggcgcccaagccgccgcccgccccaaaaccggaaagcggcggcacagcggaaacatccgcggataagcggaaaaaggaggaagcccccgggaacaagcccgcgccggccccggcttccccgcaaactgcaccggcttcatcagccgcaaaaagcgccgcataagctacagagcctccttccaggaaaaaagaaaggctttccacatccggaaataaacgtctccgcgcgcaatcttcaccttcccggaagacggatgccgccgatccgcccgctggagcaattccagcgtgtccagccccagccaggcgggcaggacagtggaaaaacgcagccgcccgttccgcagagattccgcgtaaaacaccccttccttcagccagcgttccgcacggtccagccatggacggtcatctggggcgggcaagtagcttcttccgcgggcgaggtcttcctcccggtcacgcagaatattcaccaactgcagccccatgccgtagtgcctgccccagcgcaaaagctgctcctccggctgcgtgctgaagcccggcccctgagccagcaaacccagcctggtccagaattcccctacgcagccggccaccatgtaagtataatgttccagctgttccggacatgagacggcagcatggctttcaaaatacatcaaatcccacgcctgtccctccacgatggaggccagcacctgccgcaccagcatccgttcatgcggggaaaggttttccagcagcgccaggcattcggggaaacgggccagcaattccgcctccccccggtgcgtctggattgtggaaagaacgcccagacggccaaaacaggtggcgacgacctcccgggaggcggcgccggccaccgtctcccccatcatcctcaaaagcgccaggcgctcccggcaatccatatccacggcatccgccaccgtatccgtggcacgcgccagcagatagcccacggccacgccggagcgcatttcccggggcaggaagcgcatgctcagataaaaggaccgggagacggccgatagaagatggtcaaggcctttcatgatttctgcaggcccagcctgtgcatcttataatggagtactcgcggggaaatgcccagttcccgggccgcggcggacatattgcccggagaacgtttcaatgcggctacaatcaattcccgttcaaaggaatctaccatggtcggcaaatcggcaggagcctccccgtcacgggaataagggacgtcatggctgggcatctgaagggaggcgggaaggttgtaaccgtaaatgcagtcgtcctgcgccgtaatgacggcacgttccatgcagttttccagctcccggacgttgccgggccagtggtaagccatgagcatgttgatggcgggagtggacagccgtttgatatcctttccgtatttcaggttgaacttggaaagaaaatgttccgccagcagcatgacgtcccccttgcgtttggagaggtccggcataacgatggggaaaatgttcaaccggtaatacaagtcttcccggaacttgttcgccgccatcaattcctccagattgcggctggtggcggcgatgaagcgcacgtctgcatgaagctccctgttgcttcccacgcgggaaaaggttttttcctgaagaaagcgcagcagcttcacctgcatctgaaggcttaaatccccgatttcatccagaaacagggtgccgccgtccgccgcctccgcccggccgatgcggcggctggtggccccggtaaaagaacccttttcatgaccgaacagctcgctttccagcaggttctccggcatggccgcacaattcagcgtgaccagcggcttatcctttctgccgctcagattcaccacggcgcgcgccaccagttccttccccgttccggaacttccccgtatcagcaccgtggcatcgctgggcgccacctggcggatctgttcatacacctggagcatagtgctgcaattgccaatcaattcgcccggattagtcgtcaaaagctcccgcagtttttcattttccgcaaccagggcggcatgttcctcatgcgcctggaggctggcagccagagcatccccaacaatattgcctacaatctccaacagtttctgatcccgttccaggtcggtgtcccggtccacggcacggtcaatgctcaacgtgccgatgacctgctgcaaatgaatgatgggaacgcagatgaaggctactttttcaccgcttttgcgcgtgcgagtacggttcaggaacctggaatcccgggaaatatcctcaatcacatggggcctgcccgtttccgccacatgccccgtaatgccttcccccacatggtaatggccgcgtttcatttcctgctcgtccaggccgtgggaggcttcaatcatcaaatcgttcccgcggcggatggtgaacgtgccgcgcagcattttcatgcggcggtaaagcacgtccagaatatgccggagcaaagccgtgccgttgcgttcattgacaatggcggagctgatttctttcagcacgaccatctccaaatccggtgacctgtttatttcattcatgcaatccggggctgggcgaatattaaccgcacgcccccgccataccaactactttttcttccaccgccatgcagccgggcaaaaaaacggtacggggaatatggataacatcccagcaattaatgttgatgatattacgaacggggaacaaaagatttttacaaaaatgtaatatacatcccttgtttcgttccgttttacatgcccacgtctccgccggactcccgtttcatcatctccgtgataacctggaacaacgcgttgcggtacagcacgccgtccagccgaccggtattcttccagaccacgggaaaggctggcagatgggtttgttcaaacagcttcaaggcatccgtcagatgggtgccggcgtccagcacgggagcgcccgtacggaccagggacccggcatcggccggggccgcccccttccgctcctccatctgccggcgaaccgccagaaagtcctccggatagatggccccttcataagttccatccttattcaccacaaaaaccagatctccgggattccgcagcatcagggaagagacatcatccagggaagcatccggggccacctggggcaccacgtgccgcgccaggtcatgcacatggacttgcgccatgggcagactgacgacggacgccggactgccggccaggctggcggcatacatggaacgcgcgcgaatcagttttcccgtgccataagcgcttacgacaccgatcagcaagggataaatcatctgtccgctcatggaaaactccaccaccatcaccagagccgtcaggggggcctgggcagctacggcgaaaaaggacgccatacccaccatcgcatacgccaccgtatggttgccctccattcccagggacgtcagaaccgtactgaagataaaacccaccatgctccccacgtacagggtgggcgtcatggctccccccaccgtgccgcagccgaacaccaccgccacggcagacaccttcaccagaagcaggacgagcgcctcccgcgtgccgtaatcctcatggaccagcccggtaatgagagcctgaccgttgcccaccacttccggataaaaaacggccagaatccccacgaccagcccggcggccgccaatcgcagcggcagaagggactggcggccattcaaatatctggcggccgcatccagcaaacagacccatcccctggccgccacggccgccgccgcccccagggcgatgcaccagagagactgggaaaagacagtaaagctttcaaacggggaactgtacaaaggggtgggatcccccagcagatgcagcatcacgaacccggtacaggaggcgataagcaggggggccagaatatccatgctcacggtgccgatgataatttcactcacgaacaggcagccggaaaaaggggcatggaacgccgtcgtgaatccggctgccgctccgcagccgaccagcaaccggagccgcggaatggatacatgcagacgctgccccacggtagacgcaatcagggcggaagactggatgataggcccttccttgccgatggccgcgccggaagcgatgctccatgccgcggaaaaaactttcagggcggaggcccggaacttgatcagcccgttcccgatggacatggcctccatatattccgtagcctgccccggcatcctcttcttcaggaatagcagaatgcagccggccaccaggccgcccgccaccggaataaacatgcgccattccggctccaccagggaaaaggttcctacgcgggaatccgaccagatgccggtgagcatccactggatcacttccaccatccactcgaaaaacagagacatgcaggagcccaccatgccgacgagaacggcccatacataagtaacctgcctttcccccaccttccaatgatggaacagttttaaaatccatccgtaccagacggaatccggcggctgggactggggggacggagaattcatggaaaagaaggcaatactattccattgtgacaaaaaaatacctccggctgttcgatacggaagaaaaaacggcccatccccatgcccctccggagccagagaagattttcaacggatacgcagacggctcttacgggcccccttcggggcctggcccccgcgccggtagtcagaacgtatatttcaaattgacgccgtaatagaaatcatcccccagccccttttgctttaccacggtcagcgcctggctgtaattggtgaacaattccacagtcaggcgcccggtagcacggaaggtaacgctcagattataatccagagcattggaaccatggtgcaccaccgggcctacataccccccattgtaaccgtagcgcactacggcatccacccgcacgcaatcagctatttcttcatgcatccccgcaaatacggcataataaccacggaacgtatggttgttatactgccagtacaggtccgcgccgccaaaccagcggtcggaaaaatggtaggtcgttttcaatccgggacgcgggattcccttatctcccggaaaaacaaagctgtgctcataccagggcatgaccgtccagttgcccagttccctgacgtagtccagccggtatttcagctccgcatgattccggtggtccgtggaaacgccgtaccatattttccccacccactctttatactgtatttcaggaacaaacatgcagagagaaccgtcccacaagtccaagccctcgcactcgtacttgctggcccaccccgcctgaaatcgcaaataaacacgctcatccgcaggaccggccagggaaagggggtgggggcatgccgtcttcaggtggtaggactgttcctggcagaccgccgtcgcccaggctccgggacacgccagcatgccggtgcaggccgccagcgacaacagaattacggtattcatcttcatattggtcatggctggaaatttttatgaaacggcatatccggaagcggcgccatccacccatgcgtacccgcatcccgctttggccgtaaacggatactacgcccgcacccggacaaataccttctaaagatgagaccagcataaaaaaacaatattcagttccaagagccaaaaaaacgaattccccatgaaagattgtgtcagcagtctttgtacctgtaaccgtgtccatgaaattcattatccccgcactcgccctgtccgcctgccttcccgcagtcttctcacaagaacaaatcatcccgaaaccggcggaaatcacattgttcacaggaagtccggcccgtctcacaccggattccctcatcatcacggaaacacaggacaaagctttcctggatcaggcagggcaattgcagcagatgctcagcgcagggacgggactcccccttccccttaaaccggccgggcaagcgtcgaaaaaagccgcctgcattgtcatcaaaaaagacccagccctggccgccaggggagaagaagcctactccatccaatcatccccaagtgaaatcatcctttccgcagccgatgccaggggcatcttttacgcggggcaaagcctggtccagatgatgccctccgtcttccacgaccgaacggcggataaatccgccgtccggtggaatatttctgaaactccgttccgcataacggactacccgcggttttcctggcgggcgctgatgattgatgaagcacgccacttctttggcgagaaaaccattaaacagatcatcgaccaaatggctctgctgaaaatgaacatcctgcactggcacctgacggacgacacaggatggcgcattgaaatcaagaagtatccgcgcctgacctccatcggctccaaacgcagggaatcagaaatcggcacatggaacagcggcaagtcagacggaacgccgcatgaaggcttttatacccaggaacagatcagggatatcgtacaatacgcagcccgccgaaacatcaccatcgttccggaaattgaaatgccgggccatgccagcgccgccgccgtagcataccccttcctgagcctgaaaactcccggggaagtgcccaccacattcatcgtcaatacggccttcgatcccacctcggaaaaaacttatgccttcctgtccgatgttttggatgaaatcacggcgctcttccccggcagaatcatccacattggcggagatgaagtgcgctatgacaagcaatggaagggtgttccggaaattgagaaattcatgaaaaaaaacggcatgaaaagttatgcgaacgtccagatgcatttcactaaccgcatgtccggcattattgcccaaaaagggcgccgcatgatgggatggaatgaaatttacggacatgacgtcaatggggacggaggaggaaaagccggcgccaaactggatacaaacgccgtcatccagttctggaagggcaacaccagcctggctaaaaacgccatccgggacgggcatgacgttatcaattccctccacacctccacctatttggattacagctacggcagcattcccctgcaaaaggcatacgggttcgaacccgttttccccgggttggaggaacagtaccaatccagagtcaagggactgggcgcccaagtatggacggaatggatttccacaccggaacgcctgcactaccaggcattcccccgtgcctgcgcctttgcggaagtcggctggactcccgccggtaaaaaggattttccggatttcaaaaaacgcttgaaagcgtatagcgagcgtatggatctgatggggatcaagtttgcccggaacgtcatcagccaaatagacaaatctgactttttcaatacgcccaggatcggcacatggacgccagccaccgtgacccgggaggaacattcgtttgacgttaccaaactggtcaaagcgtccggcaaacacaccgtcaccctgctgtacgacaaaggtgcccacgccatcgaaatcgaatccgtagccctgtatgaaaattcccgggaagtctcccgggacgcccatgcgggcaggagcggcgcccataaggaaaatatccagtacattctgaatgccccggaacccaggcaaggagcaacctatacggtcaaagcaaaattcaaaggggacggaggccgggattcccacgggacagtgtattttgaaacgccataaaaacacagcccccgtcccataccagaaacagcagggtcttcacatttactccgacaaacggagcacagcatccgcagactcatggttacggacacgagcctttcagtatcatcggcctcccaagggcgccggcatgttttttcatagaggaagacgcccccttccatcaagcggcacgaaattgatactttaaaccagaaaggcttaccctgaaatcagccttgccttaacaaggctccggaggtcgttgcttgcgaacctccggaacctgaacaaccgtgaatcggcggaagatgattttcatccgggaaagccagacggaacttacatgttatcatctaccactttttccacatactggaaaaagatgcttccgtcctccccgctgattccatagtctctgacatcctcaatattcgcattcttgattcgggtaataatatagactttggagtacaaaatcccccattccccatactttttcttatcaaaccagatatggtggttatagtatggttcaaaatagatggtgcctccgtctatcggatcggaaatcgggccggaatatttgacaacaatatggctgattcccttgtaacaccattccctgccgcattgaggatttttggaaagggtggtgctcatttcaatggtggtgtccatgacatcataggacaacctatcctcatcatggtatttgattcctttttgaggcagattgaactgatttttgatgatgactccatcataaatgagacgtccccctttccattccgtcttctgcggcactgtttcccctttcaagagacagattcctgagagagaaaccattattgcacaggcaattttattcattgttattttctactttgttgttgtttcagcaattccttattgaggaattctttcatttcctgaacagttttttcaggaggggtcttcgcatcgtcccgatactgcctccagtcgatgcgcagcttggccatcaggcgcaattcgctgagagaaaaaggaacagtacccggggcattcggcatgaaatcccgggacctgttgccaatataataaatctggctctgctcccaagaacgcttcatggtctcatcgaaggaagctctcacacggtcgtcgcttactctggcttcccactggaggcagtccgccaggcaaccaccctcggcccgactcttccgggcctgccgccacagggaaagaatatacctgttctgaagactacacgcagccggagtaaggtacttgcgcgtatactgcaactcatacagaggcttgcacacagccttttccctctgtcccagagtagctccactcaccctttccggagtggggacaataccggccagagcaccggatacgtaataaggcagttcctcaggcattcgaatttcccacggtattttttcattcacaaacacgccgtttaaaatggtattaaaggaaccgttccggcaaatacggaacaggtaaatcccccctttcctgctcatgaaccttttataaaccccggaccccgcaaatctggaaacgcgtgtgcgcgcctccaccgggtaggaataccactgctccatggatgcagcaagttccttcccccaattattctgttctcctatcgcaagatccccctcaatattgaactggaacacaaggggagcggtggaagggtgccttctggcttccaccacgtaatcccgcctggattcattggtgagataaccgttgggattgtaaaaatacagggctatttcatggacaccttccggcacctctacggctacccatatatcgggtccgtccacaaagcccggatacacttctccgtggtcatcccactccgcctctgtccgcacggaatccgtagggtcgaaaagaacgttgcggttatcattttccttgatgctgtgcacccaccagcgcaaagcgtcccctttcttgcggttgagccccatcagcccctgaatccagtagggagacaaggcccccttgtatccgggatgtccgggaacggaagaaagagtacggaacttgataggcttggctttgaattcggaattgctcatgggggcattcgtggcgcacagcgtggcacgcgtgtgcccgtacttcccgcaccagtccccttttgtagtccagtcctccccccggaacacaatattcttccccgcatgcgcatcggaccccagcctttccaaccttctgagcaccacagaaggctcctccatctgcgccggacgagggaacgggacttcattgtccatctgttccctgtccagtttataagccagagtcccctttttcagacgaacaaagccccgtccgtatgtcgccgcccaaacactcccgtcctgaagcgccagcaaggaaggaacatccacgttttccagccccttccttattctctgattcaccgtcattttttcagcatccagaacatccactccctgcatccggtagccgatgaaaatttccttttcctgctggataatggaagaaataaaatcttcagacaacattctggaattcgactcccccggcaccgcagtcttccgtgcggcagaaccatacagatggttgtttttctgggcataatcacgccctctcatataacgccaagaactaatgccgttactgtacgccaagcctgagcaggtacctaccaacacctggcccttatccgtacaagtcaaaacattgcagatattggaaggcaaaccatcaccatacggctggtacggctgacgggagaattgcctgttatcccagtaccagggagcctgaacatttttccactgcatatactttgactggcgcgaagagcaggataccccgccgcaagcataggccagccacaaattccccctggtatcaaaacctgcggaagccgcctggtcttccaccaggccggtggacctgtccagcgtcttccatgaatcgcctgcaggatcgtaaatggatacgcctccggatgtggcgacggccacctccccggaaacgggagaaatggccaaagcataaacatgctctccattcagggcattgctgcggtcatacatcttccattcccttccgttaaaaacggctacgccgctgtcatccgtgcccgcccagatgcgcccctgcctgtcctccgcgatacaggtgaaattctttcctttggggaaaccggaataataatccatattaagccacgatttttcatatgtccggtccccaatctgaaggcggtaaatgctttctttttctcctacggcccaaatggagccgtcgccagctaccagcgtgccgcgaataaaacggaccggacattccggaagttgctccggtatctggacggttacgacctttcctgccgcccacgcccccaacaaaaggaaaatcaacacaaatgtccctacgaagtgtttgaatttaatcaacataaccaactatctcctgattattgcaggataatattatcggtttttatcattgtcaacgccattttcaatttattgtcaagtttatccaaacaaaatacggcataattcgtttagaattatgcacataaacaatttaatatatgttagttatattaaaaacatcaattccaagaaaatcctcactaatacttttttatgcttggatgggaaaatacagggaacaggcctgatagcaacgtccggcattccgttttttcaacatgttttccccggttattctctgattcaaatttcaaacctaccatgcgtttccccatataaagttatatttaccggccttttttgaggcaggagaataaacacagctcaagatccgaaggagaagccatctactctaccgaagcggcaataggaggcaatatggacgttcccggaggagggcttcccgatgatggccaaagaaaaagaaagtgttgtcctcaccaacacgaacaattcttccggacctgattccagcaaccagttccggcatagtcacgcagcacccttccgaccatgaatgaggtattgcttcataaagcgggactgacggtcaactgtatattaaagccaccaaaggaaaggagggaggaaccagtccgacaggcggaaaagaagaaagcgaagacaaaaaagatggaataaagcccccggttttctccctagatggcctatccgggcgattataatagcggtctgcaggtttctgttgagccccaagccgggggtatgaaacaccgcctccctaaaagatacggccaaattcacgacagatagaattatgccgtcccgtacgttctttcctcatacccaggtgccaattattacttctagataaacggaaaaaacgaacctccctgacctatccaacccctccggattatttctggagaggaaggtgttccgttccacaacaaagaaaaggaacatatcattctgcatccggcccatagcagaacagcctttccgccccggattacctccctggggctgttgaataccctgctgaaatatcgaaacgtatcaaataaacacttattaaagctccgcagccgtcaggtccacgcacaaaccttgacaactgcggagctgcgcttacacacacttattcatccaacaaaaatcgctcagcagagcttcttccatcaggaatggtggaaagccgttccttcttccgccgtcatcggagaagagaccgggtgtttctcgaagaaagagagcatgcgcttgtagtcttccaggaacaggtctgccaaatctttggagaagccctggcgaaccatgacgcgcatcaccaccgtatcctgacagttggcagggagcgtgaaggcgggcacctgccaaccgcgggttctcagcttgtccgaaaggtcaaagagcgtgtagttcgcacgggctccatccttgatgaagaagcagacggcgggaatacctttttccggatcgcccgtacaaatgaattcatacggccccagtttggaaagctcatctgaaatgtacttcgctacttcgtaggcctgtgtatggatgttcgtatagccttccttgcccagtcggatgaaatcataatactggcagataatctgtccggccggtcgtgagaagttaatggcaaaattgggaatttccccgccaagatagttgacattgaagatcaacccttcaggcagttcggaaatatctctccaaacgacccagcccactccgagcggagccaatccgtatttatggccggaagcactgatggacttgacgcggggaatgcggaagtcaaagacaagatccggggcgcagaacggagcaaggaaaccgccgctggctccatctacatggatgtcaacgctgatgccggtcttgttttcataatcatccagggccttggcaatctccgccggcaattcataagcacccgtataggtcactccgaacgtgggaaccacaacgatggtgttctcatcaatctgttccagcatccggtcaacatccatcttccattttccgggcgccatcgggatttcacgcatttcaatatcccaatagcggcagaacttgtgccagcagatttggacagggccgcataccaggttgggcttgtcaatgggtttgccggcggctttccggcgggctctccagcgccacagggcggccatgcctccaagcatgcatgcttcactggaaccgatagtggaacaaccaataggcttttcattctggctggcattccaaagattggcaataatggcagcgcaacgcatctcaatagcggctgtctggggatattcatccttgtcaatcatgttcttgttaatgctgagattcatcagcatcctgacctgcttttcatcccaggtctggcagaaggttgcaagattctggcgggcattgccgtccagcatcaattcatcggacaccaattggaaagcgtcctccgcgcgcatcgcataatccgggaactcatccttggggagaaggttatctgcttccggagaaccgaaaatggaattttccgcccgggctgtatcgggtttttgatttggatcaaacatgacggtatctattgtttcatcgtttccgggccaaccgtgaaaggcaacccgcatgaaggatagaagcacccgagaataaaagcgttcatatttccattgtcattatcctaggtataattttcccggaaaaacacagagtcgagatttatttcatcattcattgatgactaaaaattatttaattgcaaatatctttataaaaactcgccaatatctccagataactttatgtatgacatctccatattatgacagttaagagaaacggacgttttcggatgcaattcccagacgggataatgtgttaccccctatcttaacaatacaacatccattggaaaaaactgtatcacggacttttacggttcctgatgccgacgcatgcatgcgcactttcagaaaggggaaaaatacggcttaacccggatttccatcaaaaaaactgccgcacaataataaaaccaacatcgtggaatcttccccacttttcctgatgagcaacttctggtgcagacaaggggaagaaatgctcaacttataccgggttaatgccgtggcaagttacgcccttttaagtcacggctggcagcagaggtatcttctccccctccctgcactttttacccggtcaacaggcgacattccttcaggattactcccgttcaattttccggaaggtatccttcacataaagtacatgcggataaagaatggaatccggagctactttgggatgattgaattccgctatttttcgcattccaacgcgttgcatcacagcttgtgaagggaaattcacgcaagcagtaaaagaatatacccggtcaaagccgaatcgtgcaaaaccatgttgcaggcatgcacgggcgccttccgtagcgtacccgtatccccaggcttccggcacaagcctccagcctatttccacacacggtgtaaagtccgcttcaaaatcagcccaatgaaagccgagaaggccgatcaaggaaccggaatgtttcaattccactgcgtacaatccataccctctttcatccagttcttcccgcatacggttccacatggaaagagaatccttttccggcatgacaccggggaaaaaacgcatcacctggggattggcgttcatagccgcaaaaaaaggccagtctttttcccgccactcccgtaacaccaagcgttcagattccggcaatgacagttttcctcccggcatggccttagttgtacatggaaagctctgtttccagctccgggcagcgattcacgcgaaaccgttcatccagttccagaatttggctatggcccaggctgtccttgatggtgagattgactttggaacgaccgggatacctttttagaatatcccgtatctgttccagattttttctcgtgtggcggaggggactgacaatgatattcagaggcccctgatccccggatttggatttgcgctttttgcctccaagtgggtcaatgctctgggcagccacgcttttggaggatgtacggtcatcctcccggatgttggctcgcacggagacgaaaacgcccggctccaggccaccctccatttcctgggtcttttcataaacatccgaccacaacaacacttctatgctgccggtaaaatcttccaacgtcagaatggcgaattttctaccggccttactgattttgggggtgacggaacgaaccatgccggcaatctggtgcttctgcttgagttcgtgtggttccagcgtatcaatgagccctatgcgagtatatttttccgcatcaatgacaccgcgcatggagtccaggggatggccgcaaaaataagcgcccaacagatccttttcatctcccatacgctgctccttggaccactccggaatggcaggttcatccttcactctgggcgcttcaaaggtcatatcaaacagagacccctgccctaaagccttatccctatgtacctgggaagctccgctgagagccaggtccacacgttcaaacagaacacaacgcggctccagcgtccagtccagcgctcccgcacgaatcagggattccagaatctttttgttgacagatttggaatccagcctgttgcaaatgtcctccatactggaaaattccccattcttctctctttcttccagaagaatctgcatggccccctctcccacgttcttaatggccgccagcccataacgcacggccagcttgccggagggcattttctcaggagtgaatttgagcatggatttatttacatcaggaggcaggatctcaatacccatgcggttggcttcctgaatgaacactccgattttgtcattgttcgcctcattggacatcagcccgcagaggaattccacagggaagtgagccttgagataggccgtccagtaggaaatatgcccgtagcaggcggagtgggacttattaaaaccgtacccggcgaatttttcaatcttgtcaaagatagctgtagccgttttttcatcaatctggtttgtcttccagcatccttccacaaagtgggccttttccttggccatcttcgccgggtccttcttgcccatggcgcgccgcagaaggtcggccccgccaagcgtataaccagccagcagcttggccgccgcctgcacctgttcctggtaaatcatcacgccgtaggtttccccactgacctgttccagcaaaggatgctcatactccacctggcgcagccccttcttcacctcaatcatttcatccataaactgcatggctcccggtcggtaaagagccagcaagtcaatgatgtcttcaattttctgaatcccgtaacggcggcaagtgtccaccataccgccggattccaactggaaaacccccatcgtatctcccctgttcagcaagtccagggtttcccggtcatccagagggacggaatccagtttgaactccggcacgcgccagcgggcgtattgctccgcatcatgcatgacggtcagggttttcaaacccaggaagtccatcttcaaaagccccacttcataaatcgcgctcatgtcgcactgggcgacaacagcggcatgaggatcggacagatcgtcacgggtgagggccacatgctcgtcaaggggacggtcaccgatcacaacacctgccgcatgtacccccacgttacggatcaagccttccaggcgggtcgcgtacccccacaattccgcatacccctcatcagaggcaatcaactccctcagctcctcgttactcttgtagctggactgaagagtcaccttggggccggtttcgataagtttggaaatacggtccccgtccgcataggacatatccatcacacgtgctacgtccctgagtacggacttggcacccatggtgccgtacgtaataatgtgggaaacagcgcgctccccgtatttctgccgaacataatcaattacttccggccggcgtgtctggcaaaagtcaatatcaatatccggagggctgacgcgttccggatttaggaaacgttcaaagattaatccgaatctcagaggatctatgttcgtgattttcatggcataagccaccaaggaaccggctgcagaaccacgaccgggacctacgggaatgtcatgatccttggcccagttgatgaaatccgccgtaatcaggaaataggaaggaaatttcaactggttgataattccaagttcataatccagacgatcgcgcaattccttatctgcagctacacgttcctttccgtaccgctcttccagccccttatagcatactttacgcaggtattcttcgcgcgacgacccgtctggcgtgccgaattcggggtatttctccgtactggtggaatccagcttgatggtaacattgcaccgttccgcaattttcaacgtattttccacggcatccggataatccttgaatacctcccgcatttcctctggagatttcaaatacacttccgtggaatagcgcatgcgttttggggaagccagtttttcgttggttcctatgcaaatcaaaacatcgtgcatgtcgtgatcttccttcctgaggaagtgcacgtcattggtggcaacaatgggggtattggtcttgcgggcgatacgcaccagctccggcaggcattttttctgttcctccatgccatggtcctgaagctctacaaaaatattgtcgtccccaaaaatatcctttagcgccagaagggcttcctctgctttttcaggctggtcattgagcagccactcattaagcggtccggcaatgcatgctgtacaacagatgaggccctcatggaattcccgcagggtttccatatccacgcggggtttataataaaagccttccaagtgggaacgggacaccagcttaaccagattctgccacccggtttcattttccgccagcaaaaggagatgtgtgtatttgcggcggccgggaagctgttttttcacgctgatgggcgtcggggaaaggtaaacctcgcaaccaaagataggctttacctcctgcttccgcggtccttccggatgctccttgttccaggcggccacggatttattgaggctgtttgtctccatgaccagttcaatggctccgaacagattgccgtgatccgtgacagcaacggcgggcatccccatgcgggaacactcagcaatgaggtccttgatatggactgcgccgtccagcaacgaatattccgtgtgattgtgaaggtgtacgaaggaaccgggcatggatggatcctgtaagcggttaataaaggaaatcagcggtgaacagggcattcggccttcatggcttccacacattcccggataaggtccgggccgcgataaacgaagccggtataaagctgcactaggctggctccggccttgattttggcgacggcatccgccccgctcataatgcctccaacgccaatgatcggaatacgtcctttcaattcggaagcaaaagctccaataacttccgtggaccgttccgtcagaggagcgccggacaggccgcctgcttcttcatgccgaggattggcctctaccccaacgcgggaaagagtcgtattcgtagcaataagaccatccagtccctcatccagaaaaacgcggctgagctccgcgatatgctcatctgtcacatctggagccactttcataaaaatgggcacatggcgacccgtttccgcagccaagttggattgctccgatttcagggaagccagcagacgggcagcaggttccgccgcctgaaggtcgcgcaggcctggcgtattgggagaagagaaattgatggctatataatccgccacaggccatgccgcacgcagacaagtaaggtaatcctgggcggcatcctcattgggagttattttatttttcccaatattgacacctagcacaccgtgaaaacgagtggcggagcgaatgttttccactccggcggcaataccttcattgttaaaccccatccggttgataatagctttctggggaatcagccggaacaggcggggcttttcattgcccggttgcggccggggcgtcagcgtacccacttccacaaaaccgaatccggcctggccaaaagcgcttaccgtatccgcttccttgtccattccggcggcaagtcccacccggttgaggaatttcatccccaggatttccacaggatccgaaggaacttcccccattactagaggcagtacacgcattttttctgccaggcgcaatccccacaaggtcaccttgtgggcagtttccggattcatttggaataatacacttttagcggcggaatataaggcgggtgacacaatgcggggagtgtatcacaccctcttttagggtcaagaatgggaagcgtcttgccgggatgattttatccggtacaattccttgccatgaacaggaaggaatgcctctcatcctgccgtctgtacggtattgtagatatgggatatacagctgaacatcaaatactccctgtaacagaaaaactattggcaggcggcctgcgcattctccagctaagggcaaaaaaccataacccggaacacatcgaaaatatggggcgccagcttgcccccctgtgccgtaaatacggttgtcttttcatcatcaacgattatcctgaaattgccctgaacatcggtgcagacggcgtccatctgggacaggatgacggagacttggcatccgtaagggggctgctgggaaaggatgccgttataggacggtccacgcatagtcctgaacaggccctgggtgcatgtggagagcaggcggactatatcgggtttgggcccttgttccccacgggtaccaaaccgggaagacaagccattggcctagaagacatcgcaagcgtacagcaacagctaccggaaaatttccctgtcttctgtatcggcggcatcaatgggaacacactgccctccgtactggaggcgggggcaaacagggtagtcatcgtttcctggctgcttacacaccccgacatcacgggaacagtcagaactctcagaaaagaactgggagaagcgtaacgaaaaacgcgcacccccattcatgttatccctgcctttcctcttcctccggagacagagccggacgggagatcagaagaacggcagtattcacaatcatctgcaaaatgtgatcctgatccttcatccacggttccttttcttgaagatccatgcacgcgacatatttccccaacgtagcatggaagatggaactcatgatatgcgcatgccaagataaggaaagctcatcatcccacggacagaatctccggattcttgctatcatctcctggatagatgaagcataaaattcatcatagatttttcttcccagatattccggctcctgcggcaaacgccacaataaacggacatgatccggccctcccaggctctcatccagaaatagccgaaaagcaggttctataaatgcacgggcatacgccctcagggacggatgaagatccgcctctttcagcatcttcatgcgcgctttcatcagaggttccgcatattgtctgtaaacagccagatacagtccctccttattctcaaaatagtaaacgatagaagccagattaactcctgcttcagaagcgaccgccctcatggtcacgccattaaatcccctgagggcaaaaagcttctgtgcagcacggaggattttgccgctggtttccgcagaacggtcggactgggatttgcgggtagaagacatctcctaaacaatcagacaatgcgccgcctagcgggaagaacggcttgagccgatggcttttaccaactgttccatgttttgggaggactgaataggcttgccgtccttgtccaccagaatcatggtagggataccgcgtggagccaccttcttggcaagctccgtcaaatcctctttcaacaggataggccatggcatgttattggcagcagcccatttttgggcggcatccaggttctggtccagattgcacatgattacttccacatccggattatcctttaccaccctgttataggcctccacgctgtgaggcgcattccggcagcaaggaccgcaccagcttgcactgaaatacaaaatgaaatgcttgggattcaatttcccgtccctctttttaagtttgccgttttcaagcatgtaagtctttcccttcatctcctccgccacagggccggacggcatggacgaccattctgcaataggcttgccgataacttccttgtgttcctccagccatgcgcgatcttcatcggaaagcttttccagcggcatcgtaatgggctttttagccgtcgtcaccaatttgacggtcttcatattcagggctactggacgggcttccaccgtactgcccgtatttttattagtccaggtgcggagggaaggatcatccgctactccggaagaatccgcccaacagagagaggaccccatcatgaatgtggatgccaataagatacaccaagatgaaaatttcatacacataatgctaatatactatttcttatcttccatgtcgagaagctgattccaaaatttgcctggctcgggcatgtcccgggtcgcggcgcagggcttccgcggcagcggcagcggcctcacggtaccgcccattgcggtaaagcatcaccgcaagagtgaaaggaatatccgcatttcccttttccagggaagaacagttttccaaatcctgcaaagcctgctccagccggcccactttttcattcaacagagcacggttaaacaaagcacgaataaaggaaggctctatttttaaagcttcgttaaaggattccaaagctcccgactcatcattattttcaatctggcccagtcccaggagataccacagattggcatccctgggagccaggcgtacagcctcttgcatctgatccaccgcctcccggctgcggccttgagaagccaggaaaacggcataatcacggtgcaccacggatgaagtggcatcccatttcaaagctttggaaaaccacaattccgcagttttcacatccttacggctaatggctatctgggccagcttcatagctccggaaggctggtccgcctggtgcaaagcggcagcagtaagttccttcattcccggactgtccggaggcagggaatcccggagagcccattccgcctgcaagcgcacgaccctgaacggatcattaagaagtttgcccgcagcaggattacccactcgccccatcactttggcggcggcggctcgcgtcagaggatccgggtccttaaccgccgccgcggccacttcctggacggcgggttcatgagcccatgcatccatcaaatccaataacgtagcgcgccatgcacccacttcctccctcttaaaacattccataagcagaggcaaaacatcttcctttccttcgtaggcatgctgaacggccctggtccgttccctgtactgcgccattttgggtttagctccgtaatatttctttaccgcctccgcagcccattcattgcttttttcctcgtggcacatggtacaggcattcggaatccccaactctacgctcagcaaaggatcaggagaattgaaagaatgatccctgcgggggtcccgagccatatacaggctttccggcatatggcattccacacaccgggcacccatgctggactgaggacatggcgtatgcgtagccatgtcaataacgggagcttttacgccgtttaccgcttctccagtaccgtgacacctcaagcagagcgtattatcttcttgaggaagcttcagtgttcccgtatgcggatcatgacagtccaaacaggtcactcccgccttgcccatacgacttaacctcagaccagtctcgcaataatcctcatccctttgcatgccattgggccagaaaacgccgggctgcacgggaagcaccagttggaaatgattgtcaaagcggtcacctacggcaaaatcatgatcaaattcatccctccgggcatggcaggaagcgcagttatcatgaatctgctgtggcgttagcttgttcctggtggaaatcatgcaacccgtccccgcctccggcttgtccagcagggggccgtggcattgaatgcaagtcactccgggttccgtccaggtagaagcataccgatctttaacaggatcataattcttatggaacaaagacatgtggcaccacgcgcactgcgtgttccaattcatgcctcgtcctgtccagtgcccccagtctcccggctggcgggactccttgccgaaaatatcaaaccattctttgcggttcacgtcccatgcagcgctcaaggtatgaaaaccgccgtccttggcaggaaccagatactgcaccaggggaattctccctgtggcccattccgcgcgccaggaggttgaagactgaccgtcatggaccatgcgcccgtgaccattcgtagagaattggagaatgctgccatgagcgtccagcttcatgttatggaacgcttcagattcccattgatctcccagtttgcggaatgcccaggcatggtctgaaccggcccactgacggaattccttttcatgacatgctccgcactgcatggaaataggcacctcattctggtcccagtgctcactgcctcctgaaaaaacaaccggctgcgctgccgctccagaacgtttgtccatccaggccttcaccattgtgcccagtccgatcaaagccccaagaacaacgaggagaaccacccatttcttcatggaagggcggttcacaggggcatcagcagattcaggggcggacatggcggaaatattctgccatatcatacgcgctccaccaaggaacttttacatcaggcagcacagtccttgacatgcccagtccgtaaacggcagattattcctcctcttccaggacctcttcccgcatcagggtagtaatccgggtcacggtacagcgctccacaccgccattctccgtccgggtcaccttgaattccagccctctatagccgacagtatctcctttctccgcaggagcttccagcaaattaagaatcaggccccctacggtgtctatttccccgtcctccaaatccatgtccatggcctcccccaattcctcaatgcgtgccagaccggatacgtcacaggagaagcccaccgcatccctaggcaactccgtcagcactttaatgcggcctcggtcccagcccattacttcggaaaaaacatccgtcagggtcaaaagtccggaagtccccccgtgctcatccagaataatggcaaggcgcacattgtccttcctcatgatttccaccacattgtcaaacttcaccgttttgggaaccttgggtatggcatgaatgtattcaggagtcagagcctttctgcggaacatgatacggaacagatcgcgggcatgcaccatgcccaccacatggtccagatcaccgcggtagacagggtaacgcgtacggcgagtgcgacgcacaatttcccgtatctgctcatgttccgccccttctggaatggcgtctatcctgacgcgcggggtcatgacctggtgtacatacagatcatccaggtcaaacaagccgtccatgatgcggccggattcctgcggcaacgccccgttctcatggctctcttcaataatatactggagttcttccgcagaatggtagtgggacttggattcattacggtccacacccagcaaccccagaaagaaattgcccagggcattcatacccactaccagcggatacagacatagctggatcacgtacatgggcatcgcaatgatgaggcaaagctttgcggcgtactgtagggaaagcgccttgggcaccatttccccaagaacaatatgcaggtacgtcagcaccgccacggacaggatgctggctgcgccatgagccaccagccaggaagcccagccgtactgcgccaaccattcatggagccatccggctaccgcatgctctccgtacatacccaaccccagactggcgaacgtgacgccaagctgcgccgtagcaatgtagcggtcctgtaaccggggcgttttcaatatctgggaaacgcggcgcgccaccatgttgccggacacacccatctgctccaatgccgcacgcggagcgccgagcaacgcaaattctgcagccacaaacaggccgttcagcacaatcagcaacagaataatgaaaaccgtcatcatgcatccaccccgctttccatggcaaattcattttcctttctctccggaggcagcagcaggatagaggaaacacggttatggtccatcttttccaccacaagcacgcgtccggcgataatcaggcggtccccatccttcggaatgcaggacatgtgcttgatcacgcagccgcccacagtagtggcgccattcatcaaaaagggtaccaggcattccgccttatgggcacgcatcatgccggggatgcgcacggaaccatccggaagggtttccaccttttccccggagcggatgaattcctcatctatatctcccaccatttctcccagcagacgttccagcgtcaccagccccacaaacttaccgtattcatccagaacaaaggcttccttggccctgtcttcccgcaaacgggccatcagcatctctaccgtctgcatttccatcacgcatggcacctgcctcagcatggaacggagaggaggcagaattcccttttccgcataagcggataccatatctttaatatgcagcatgccaatgacagattcacggttcccttcatacacgggaatatgggtatgaggcctatctgcgatcatattcaaaatatcttcctgtgtggcatccacatccaggcaaacaagctgaaaacggggaatcataatttgttccaccgttcgttccgccagggacaaagcgctgtgcagccgttcatgctcatcttcctccaacatcccgccctggtgactttcatccagcagcatattaatctcctgctgggagtggatgtgctgatggccgccaggtgggagccggaacagtttaagaagcaacaaaccgcttccattaagaaagtcaatgaaccatgcgaagaaagccagtgtccatcgcatgggataataagtatacaaggccgcctgcttgggaaactgaagagccagggatttgggcatcaattctccaagaattacctgaaaaaccgtcaagcctatcagtacaacaagagcggctgcagaattggccattacggagtccatcccaccaaaccgctcaaacagagggaacagataggcggccagttcaacctgtccgtatgcgcccagaaccagactggaaatggtaatgccgaactggcaagccgcaatgtagcggtccagctcttttgtattttccaaaatcttaagcagatgaacagccaccctgctgccgttctccgccatttcccggatcatgttgcggcgtacgctcactgcggcgaattctgctgcaacataaaaggcgttgaccagaatcagaaaaagaataacgaaagtgacaaaaagaatcatgtatgcaggggtgtccgtaaaacgcaacgggcatccgcatcataggaaccgaaaaaatcctgtcaagaacgggaaacaaaaaaatctgccatgcggaaagagctccattcctcccgtccctttccagcattccaaactttctccttccggtacaggcagaaaaaattccgtctgatctcgcaagcagttgaaccaactgcaaaacatctttccagcaatcgaaaagccccgttcccggaataaccggaaacggggctgagaatttaaaggctcaacgaaaaacgttattccgtaatgccggcggcttctgcttcggcagccttggcatcgcgcaaagcggcacgtatggacattttcacgcgtcccttgtcgtcaataccgatgcacttggcggtcaccacgtctccaacgctcacgacgtcctccgtcttggcggtgcggccttcggccagttcggagatatgaatcaggccatccttgccgggcagcacttccataaacgctccaaaggtggtcgtggaaacaatcttaccggtgtacagttccccgatttcaatggtcttgaacatgcgcgtgaccaattccagagcacggtccaggccttcctgcttggcggcgtaaatatgcacggtgccatcttcctcgatattgatatcggcgccggattcggcttggatagccttaatgttcttgccgccggggccgatcagttcgccaatgcggtcagcgggaattttggtggtctcaatacggggagcattcgggctcatctgggccggagcggcaatggcttcattcatgaccttcagaacatccgtgcggccggctttcgccacgtgaatggcttcctccaatatggagaggggaatgccgggcagcttgaggtccagctggtagcctgtcacgccttccgacgtgccgcaaagtttgaagtccatatcaccgtaaaagtcttcggaaccgatgatatccagcagagttttgtaagaggtgatttcatgctggtcattctgttccgtcaccaggcccacggaaatacccgccacagggcgcttgaggggcacgccggccgccagcagagacatcgtgcccgcacagacggaagccatggaggtggaaccgttggattccatgatttcagaagagacgcgaatggcgtacgggaattcctgttcgccaggcacgaccggagcgatggaacgttccgccaaagcgccgtggccgatttcccggcggttctgaccgccgaaacggccggtgtctcccacagagaaaggcgggaaattatagtgcaggatgaaacgcttttcattcacgctgcccgtgtaattgtccatgtactgacgttcttccatcggagcgagcgtcgccaggcaaagggacatcgtttcaccgcgggcgaacatcgcggaaccgtgcaccacaggaggcagcacattgacttccgcagtcagagggcgcagctgcttgagagcccggccatcggcccgcttgtccttttccatgatggagatgcggaaagcctttttctgaatatattcaaaaacctgttccacatcaaagtcagtagcttccggatggcgttccttgatggcggcctccacttcgtcacgcagggctcccacttttttctgacgctccaccttggaaggggcgtaaatggcttcctcaatacgatcgccggcaatttcataaccgatttccagcaattccggcttggcaaggcaaagttcataagctcgcttctccttaccgcaaacggcacggagctcttcctgcttttcgcaaatgaccttcacgttctcctgggcaacacgcaaagcggcgataaaatcttcttccggcagttcattagcggaaccttcaatcatgatgacctgatccttcgtgccggcaaataccagatccagctgactatgttcacgctgggagttggtcggattgataacgaactgtccgtcaatacggcccacacgcacagcccctacgggttcggcaaagggaagatcggaaacgacacaggcggcggaagcgccgttaatgctcaggatgtccggttcgttttcaccatcggcggagagcagaagcgtaattacctgcgtatcgtagaagtagcccttggggaacatcgggcgcagggggcggtccgtcatgcggcacgtcaggatttccttttccgtgggacgcccttcgcgtttgaaatagccgccggggaacatacccgccgcagcggccttttccttgtactccacggacagggggaagaaggtttgtccttccttgactttggtggcgcttaccacggtcacaagaacgacggtatcgccgctgcggacaacaacagcgccgtccgccaaacgggccatcttgccggtttcaatcgtgataggattcgtaccaacgttgcattcaactgaatgtatgctcattatattttttgtctttcaatcacccgcagcctcatcagcccatccaggccggctccgggcgggaagcctgaatggcgtcaggtacgggcagtgcctcaggaagatgttatccgcaacagtcctttcccagaaacagagggggaatactgtccacgcggcaggacgcgcatcccagatggatcaaacgctccggcccagtcttaccggcttgacagcctgtgaaaatccgaaaatttctcaaggcatgcccgacagaaacgtttcgggaaacgaatccccgaacgtcgaatgagagcataatccctgtcaaggataatgcaagcaaatagtttgataaccatagcagtccatttccttccagggctttaaatatccacccgcatggggagaaaaggtatttttcccatctcaccttcatccattcaatattcttcgcattcctgattgaaatgcattactccaagcaaaatatccggaaacgtccgccttcccttcttcacaggagcggaaatgcagaatttaaggacggactgagtattcctgcctgactcccataacagccgcccactgctttttcatccatattttcctattctttgcgcggctgcatcatacccgcaataccggactttccgtccccagcaaacatttacgcaggaataaaggggcagtcatgccaacaaaaacaatctccacactccagaatatcttctttcacaaaaagacaggcctttcaaactctcctgaccaaaacacaaatccacagtcacccgccatgccccccttccatgacaacgctaccatgccagcccctcccataaaaacaacggccgctgcggaaaaccgcaacggccgaatcaaacgggaatatgctccgccttttagcggcgaaggccaagacgctggatcagactctggtactgggccagatcttcacgcttgacgtaatcaagaagcttgcggcgcagagccaccatcttcaacaacccgcggcgggaagaaacatcatgtttattcgtgctcaggtgttcggtcaggtgggcgatgcgctgggtcaggcgggcaatctggtagctggaactaccggaatccttttcatgcatcttgaattcctgcaaattgatttcgttactcataagtgttttccttgaatgtatttagctcgtggcagcggctaatcgacactgtgagggcgccaactatgcatcatccagccccaaaagcaattcaaatttcgtcatcccggggaatttgccttcggtccctgggaaagcggcccctctccattttccccggtgtcccagacttcgcggtccttttccgtcacggggcgaaccacacggcagggattacccacggccactacattggcggggatgtccttcgtcaccacgctgcccgcgcctatcacggaatttctcccaatacgcacgcccggggcaatcaccgcatgaccgcctatccatactccatcctcaatggtaatgggcagagcaaattccagcccctgccgtctcagccccgagtctacgggatgcccggcagtataaatgcccacgttgggacctatcagcacgtcattgccgatggtaacggcagctcagtccagcaccacgaggttgaaattgacatacacgcggtcccccagccgtatattggagccgtaatcacaacgcagcggaggttccagataacacccctctcccatttggccgaaaagctcccgggccaattcccggcgcaggctttcattttccggagcggactggttataacggaaaacaagccggcgcgccctgagccgggcggcagccaattcagaatcctgggcatgatataaacgcccggacagcatgttattccagtccttcgaggccattggatgaagagggggtcacagcgtccgcctcagaaaaaggcagctgcccgtttttctgttctccaacagacggcatggcggcggcatctttttttacggacgtttccgattttacaagttccttctttccagaggaagctgaatttgcgccagccaccggggcagcaggcttgtgcaccgtccggaacattccggacggcttttgttgaagctcgtgaatattccagtttccatccctgacaaccacacgggttcctacgggagctatttcaaagagatttttcgcaatcaagtggggaacacggatacatccatgggaggatggatgaccgggcaagtacccttcatgaattcctacagccccgttcactctcatgaaatagggcatcttggcaggttcaaacctctcgccgggacggggggaatcccttcgtatatccccatcccgcaattctccgtcagcgttaataaacgcaccgtaataggaatgatggtcttcctccttggaagcaatgaggaagtagccggagggcgtcatgccggaacttcttccggaactgatgggggcatacgcaatgcggtgcgtcccccggtagatatacatcatctgctttttcttatccactacgaccagcagctttccgggcagcgacggatcatcttcccacttgagcaggtgccccggaatagttcccgtttcttcaaaataccccgtcatttcttctaccggaatatgggaagaggggacaggggaaagctcccttcccgtggtaccgcaggacgaaaacaaaaacggaacacacaggcaggaaaccaacggatggaaaagggataatttcatctcaataagtcgcatcactgcgttagacagctggaggccggaaaaaagaaccgctttttgacaaaactgtcaactatcaatcaaaaaaatctcttttcctttactcctgccctctgttaccacatccgggcgcgcctgccgcgctcccggccgttcccggttccgtggagcaggccatgggaccaagcctccgcaaaggttcgtgcggcatccgccgtatgggaatgcccgtcatgcacggggctttccgcaatggctccgcctacgccgggaggcctggacctgtacaactccagatgctccacgcctcccggctcctcttccccacagaagcctcgcgccttttcctgggtgcgggcatggaaaaaactgcgctccagcaattccctcagcgtattaatgccacgccagacatccgtggttctggggacgacgcgcacattcaccaatcccagcctccccatattctccacataagaaatgccgtgcgcatccctccgtgcagcatcatgaggcaaaagatggaatgttaccgccacaccatgatttttctcccagtccttcattttttcaacgtaatgggccaggggctgctggctggcggcataatggtccagccagtggaaactgtctcccatgatctgcacaagccaaatggccgtatggtcactcagccccagatcccatgccgtgaaagtgggagcgtccggatcagcctcaaactccacccctacccgcccccgctcccgcagggccatgatacggctgccgtaaatactgccttcttcccctgtagcaaaagcctcctgcggcgttcccggatactcctgcttcatggaggcgcccatcacccgggccatccgggcataccatctcttctgccccgcatccagaaccactccggtctcccgttccagagaaaggaaatactcatccagttccctgctccatctgccgcgccccggcaaagtgtactcatcctggtcaaaccagctgaaaaaaaagaatctgaaatccaagggggaaagctcgcttttgcccatgttttccatggcctggcgcgtcagttcataattcactccgtaccgtccgccctcatgagtgctttccttcagaataaaacctccggggggaactgtattgattgcccccgtacggatttccctggctctccacggagcatgcacggaaacatacgccagctcggaaacatggagaaactgcatggttccccctcgcagattagtccccacccgcacatcgctcccattggagaaagccaggcggctgcgcgccaacgtacggggttgccattccccctttttttccacgccggacaggctcttgattctctctcccagccgggccagggccacatccatcgcagaggggttgggcggcacgtaatccagatggtcccaggcaaaatgcagcttggccagtttctgctgggcgtccggcaggcttttatcaatgattccgcaatgaaaattggaccggaacaggctcatatccagcatcaacatggccacatacgtagaaatgcccaactggcgcgccttcaggatgtcattcctgtaccacagccgctcatgcagccgccgctgcgccctgttcagggaaaaacgctggagctgaccggctttattttctatccagtacaggtgttccagcctccaaagctggctggacaggacggactgccacgacaggctccatgattccgtcaaatgattagaattttccatactcctctattaattctttcaacagggctccttccctggtcatccccttctgggcctccgtccccttgtccaggggaaggcggtatgccagtggatcgttcagcacgtgggaaacgaaccggagtgcctgcaccatcacgggatcaagcagatcaagttttcctttcaaataactctcacgtacgcccagttcttcatacatcctgattacatcctccatgaagcatcccacagcctgtcttctgttccaccaccatcgttcctgagcatccgcatcccccagcgtttccaaaatccgacccaggaaccgggtacggctcgcccgtgaatcttccggggaaggttcctctccggctcccgtaaaacactccagcggaatataggaatcccgttcggacaccgcaggcgctccccggctgtccagataaacgccgttccatgcatgtaccacgtagggcgcgcgtgcctgccgtacgggactttccggaatgcccggcatcaggcgcacggtatgccccgggtcgtccgggtcacggtaaatcacgcagttggcatacatcgcgcgcgcttcctccggctcaggaagaaagggaagcatgccgcctctcagttcctcctgcctgcggtccagaacaccaatcagggaaatggcctcatccaacgggagttcccggttccagacagacgtcacccccccgggagccgctccggaatcaatccggtaaatcttccctttccaactaaccccggattccgtagcttccggtcggcctgcaaaatcccgcctcaccgcatccagcgtctccacagcccggaccacatccggacggctacgccaggcggcaggggcgggaacgccacgcctgacggaaaaatcttcttccacatacaggggcgcttccagaatgggttccggaagatgttctcccaaagcctccagggaaacatccttcgcgcgcagaggtcccaatccggtccggaacggctttttcaccaaatgcaggtacaggccgggatgttccggatccggacgccaggaattcagctgggggaactcctgaagcgcccgggacagttccctcatgcggctttccgccagccgctccatcctgcgtacggaaccgcccgcgtatccgtccagcgcggacagggaacgcaccagtccctctttcacgtgatccggaacggtaaacaacagccgtccggacatcaggctgtgagagtaccgctccaccatggggaggcggacctcccctccggccggatcccaggcacgctccgcccgtatgcgttcattcataccaaccgtctctcggagcattcccataaactcggcagtgtccgcatcctccctcagcgttttcttcagcaatccggcccggcgcaccaattcctcaagaggttccggaaccctgtcaggcattgcggccccgtaacgcgcccaggaagccaccgtttccggtacggtgtcatgatccagatgggcaaaaaaatactccttggacagctgggacaactcttcaatcagttccgtttcccctgggagcttcctgcggcgcggcacacgttccaaatgtttcaacatctcccaagcgccttccggggaaagctgatccgtgcgcatcagccggtcccatacgacttccgccttgtcttcgatcaaagccaggggattggccgtattatgaagcctcagccggtgcattaccaaccccttggctgaggaaacgggcaaattatccgcatccacgcccagcctctgtacggaacccacatacttttcgtgaatattcatgcgctccaacagggcatcacggctcatcagcgtttcagcggcaaggcgcccccggcccgtcacctccagacgatccccggaccccaccgctccgcgcacgccgtaaccagctttcagcatatccgccaccgccatggccgtcaggctgtcatacaggcaggggagccgccccccctgcacgttttccaacccggtggtcagcctcagataattggtatcccattccggccgcccgttatgggcatgccattcccagctacggatcaaatccctcttagccgagcaggcggcagaaaacatcatggaaacattggccatcaggtccgcttccgccgcctcccgagaaggatgccagtccgaccaccttccattgggatactttactctccacagcctttccgccccttcccctccgggtgaggactggaacaggcgcggggtcaggaggagaagactctccaccgctttccgcgtccccggataaatacgcggcgaaacctgttccggaccggcatgcagccgcggagcatccagcacagaggcataacgggccacgttctccggcgccacctccagaaaccgggccagcaaccgcccgtaactctccacgggcgtatagccgcgccccacatgcacgtcaaattccttcatgttgggaagtacgtggtacaggctgttcacatccgcctgggttccccataccatgcggttcatctcccgcagctcagggcttaccccatggcgttcctctccgccaagagaagccatcatgccgctcatcctggccagggcggagggaaggccgtccggattaaaagattcagacaacaaatccggagcattcagcaacgcactcccttcctccagccaccggcgcgccctgccgcaggcgccttcatcccggcaaaacgacttccataaacgaaaagccacatgcccggacgcctcttcatgcggcacgccgtgtacccgttccatcactccttcataaacattggctcgtgtccgcagatccatatcctccgtaacggcgtcccagtccctgccggaaaaacccgcacggcgtcccgcctcttccggataagccagcagcaacatcctgtacggccgataggagcgcttcttcagcctgtccgccacaaacgctcggcgcaaagcatccgcatgaatatcatattcctccgcattccttaaacgccatgggatttcccgtccgttcctgttccggaccagacccaaatcttcctcttccatacggcccagagtctcataccaggaagaaagagcctcctctacggaaggccggccctgcgttcgcttcatctccacaccgggagccggttccgccgcataaacaagctgcccgtccgctgcggcggcttcacccacgcggggcagaccggcacgcaacagccacttggttctggccgtaacataatccggatgaggaaaaagctttttcaacaccgcttccgattcggggaaatcccgcatcttccaaggctttgtacgtacaggagaaggcaaatccaaaaaatctctcacatcctgttccgtcttcaaaaaaggctctccggcttcatccagggcgcgagaccactccaaagccttcctagaaatgtacaaagacccccacagcggagaattacgcagggacttctgcaacaattccccggcacggtttacatccttatcctgcaaaatcctggaaaccgtttcatccggaattccgaatactttcagaggggaaccgtctccaagcagcattccggcatggcggaaatggttcagagcgacctttcccgcgcctatcagcaggaaaggcatcatcatgacggcctccctcaactggtcatccgcggaagcctgtctggccttccatccctcccagtccacaccggacgccttattcgtaagagctcccacgccttcctgaacgaccatgggcgtcaactccatcaatttattttccgcctccatcttcacggcatccgccgcaacggctcccattccgggaaaaaacgcaccaggattccctgatgcgggcctcatggcccggaacgcccgcattccctgccccaacatcttctggcccagtttcgtcattccgaaggaaagcaaggtattcaccccgccggagacgacagctccccccatctgggcatcaaacacgccgtccgggttcatgctccgggcctccgccatatggcgccccgtctcccccgccatcaacatgccaagcccggcagggccgcaaaacgccaaagccgtggacgctccctgctgggccatgtccaccagcatctcccggaaccagggggaatcctttcccccacgcagcggggcaaactccatcctggcaaaattcctcagttcttcaaaactccgggaataattgtccagcgcctccttttcccgtccctccggcaggagccatgctgcgccgtttacggccagctgggccgcattctccgcaacctctgccgcaccgcgtttaagcgccccccccagggcatcccgaaaggcggggcgggaacgcaaatagggagccatcatgcggaacaccttctgacggtctccatcctccagggaagccaggcaacccacggcgcgtatgacgtccggaactccggcaacggctttccggttcagttgtacggcgggaaaaccttccttcaccggctcctcactggctaccagcccctccaatcccttgcggatgatcccagcggcatccgccagacggttcctgtcatccagagcatcggatacggccctgcccttcaactgtcgcgccacagcctgcaaatcttccggccatgcggaaatggcttcccttctccgttcgtcaggaaccgttccgccaccggacagagtacgttcatactcttcctggtataattcaaataaagcctccctccgggaaaggcgcacctgattgtgcatggaaactgccacgaacaattcgtcatcagacttgccggacgctccatactgccgcgccacctgttcccggatactcttccagtccctccggatgcgttcacggggaatcgtcccagaatccgccacccaggactgcatgacgcacgcggcaattctttcccggtccgccgtcccttccggatacatcgcctccgctttcagcctcacttcccgcggaatggtcatcacatcccccgtcaatacgctattccaatattcttccctttccgactcccgtttcgggaatttttccatgccggaaggtacggaaaacactgcgttctctttccgaatatggcgttcccccacagttccgggaaccgtttccggaaaactcccttccagcgggagcgcccctgtctgttccctgtttccattatcttccatcatcactttccttcttttccgttattcatatctgaaaaccccacccagccggcatcctggaagcgtttctctttctcaaaaaccttttccatctccgcagccggctgctccggggccctcttcaccgcctctgccaattccgtctggacacgcttccattcctctgccgcacgggcatcctcaggcggcccccatgcgccattccggaacatggcggacaggcgacgggaagcagcgcggcgcaattcgcggggtatgcccaacatcacctcgcgccgccggagaagcctttccacctgaacggcaggcaaacctgaagtggccacttctatcagggcgtcagcatcttcctcccctccgcaatcctcatcaatcagcgaggtcatgcggcacaacagcatatcgtcctccggaatgctgataccggaaaattccgccgtctgcctccggtcacgggaagccgtataacgtcttagctgctcggaactgatcaagccatgcttttcagcattctccaatccgtcatcccgcagcaacccgccgccggacacggtgaccgccagagcatccgcataacgccgcttcaactccccatacgctgccgcagcctcttccgccaccttcttttcctccggagttcccggcatcttctcctgccgggaaacgaggcttacagcggccgccggatcacggcggacctcctccaccgcccggttcagcgctgcgcgggaatacgcttcctccgccatgcgggaagcctcctctcccgttacaaatattccgctgccctccttaatcctgcgttcggccaaagcggcctctcccagctccacggcagactccacccccccggcccaatatcggcgcgcttcctccaactgccccagacgggacatcttctgcaaataaatgctcccggcagtctccagattctctctcgccatggccacgcgctccctcaccgggccggacatacgggcaggcagataggaaggaagccgttctgacagagccttcttccatctctcctgaaggtgttccgaatcccctccggcttccagctcccgcatcacgtcctgttcaaaacggtacatcccgtcacgggcctgcgcccattggccggcatccctcacctcctgcatttccttcagcgcgggtcccgccactccggacacatccatcacgcccgccgccagatcccgcacaccggcggcctgtgcttcaaaagcgttcaatggaatcacgccggacaaatccggagccacatgcaacattccaaaatcctgtattcgtatagccatctttaacggcttccaagctaaagagcggatggaacgcacggcatccattccaaaccgtcaccgtccggcacttgccgcttgccaaaaccgggccgttccaacacaatcacccctatgccccgcattcgtttcaccgccgcatatgacggacgcccttacctgggctggcaaagccagccgggaggccgtaccgtccaggacgtgctggaacgagccttttccggactctttggaaccccctgccgtatccacggttccggcaggacagactccggcgttcatgctctgggccaggtttttcatgcagacgctccggatacccaccgcattcctgcggacaaatggcctgccgcgctcaacacgcgcctgccccgaaccatccggattacccatgcggaatacgttccgcccggtttccatgcccggttcagtgccacgggaaaaacctaccgttactgcatttcatgcgctcccatcctcaacccttttgacgccgggctggcctggcaccgcccgctggcatggagcgtggatattctggaacaggctgtacacctgttccggggaacgcatgacttcactgcttttgccgccctgcgcggcaatgaaccgcgccccattccggagggttacttccgccgaaccatcacgcagacacaagtggaacaggcaggggaacatgtcttcatcacctttaccggaacgggcttcctctacaaaatggtgcgcctcatgacgggagccgcccatgaagccgcacggggaaaaataacgctggaagaactggcgcgcctcatcaacgctccgctcccggatgacaaaagcccgttttgtgccccgccggacggactcacgctgatgagggtccattaccaggaaaaaacgttcggagacaaaaagaaaataaactgaaaacggccgtccttctagacgcgtgccgtaccgtacaacccttccctcctgatcagcgcctccactttccggttcagatggggaaccggacatacgcccgaacgcaaatcatgccgtatgcgggtggaagaagcgggttcatccccttctatgaaaaaggcgcgcacccctttcctgggagatggaaccccgccgcggcggtaaacaatgaacgtcaccaggctggacaaatattcccagcgtccccactgttccagagaatcccactgatccttgcccatcagccagaacaattctgcaccgggataacgctccgccgtcctctcagccaccctccacgaccacgaaggaggcggaagctccaaatccgtccggtcaagcacggcccaatccagcccttgaagagccagctcaatcatccggcagcgctggtcatccgtcacggagggggcctgctccttcagcggagacagggaacacggcataaacagcacgcggtccattccgcaatatttccgagcatgctcggccacgcaaacgtgcccctcatgcacgggatcaaacgaaccgccgaaaatacacagcttcaccgtcatccaccagaagtcagagaccttccgttcccttgtaaggcagaaacccgccgatgggaacgcgcaccatccttttctccagaggcaggcggcggaagcgggtaataaaatccgtcaggcgaccgtaattgcgctccgtcttgggaatcccctgatggccgcaattcacatccgggttgtaatgcagctcaacatgaagatgggccggatacatgccgcggttcgtgccgatagtgcctacctgggtgccgcgcagcaccaactgtcccagcacaacgttaatatcgttcaaatgggaataaagagtctggcagcaaagaacctttccggacttgggttcacggaaagcatggcgcacaatcaccacctttccccacgcgccccgggcgtccgccgcataagttaccaccccgtggcctacggaataaacgggatcgcccaaatcggaattgcctcctttattgccgttccaatcctcgcccatgtgacggggacttttcaggcgcaaaccgcgggaccggtaatagccgttgccgtcaggcttccctaccggaaaatcaaaaccgtcacaaagaggaacaagcgcaaacttgctgtcccgccgggccatgtaaacgggagcgctctcgctgatcaacgcggaaccggtcagaaaaaccagcgccagcagtaaaaaacggaaataggacatgggaacgaaagtcctttgtatgctaaacggctccctactccgtatcaagcggaattccccgcatgtcggagttagaattcactaacacgctgtcccctgtttcccgcttcctttcaacttgacagcaaagcccccgtatgaaagaagggaggagcgactccgtatttttcaacacacttttttctgcatgaataagctaacaacactcttcctcggaacagttctctcttcctccatgctgcccggctggaccgcagcaccgcccaaaccatacggcgcgattccaacacctgcccaaatcaaatggcagcgcatggaattctacggcttcatccactttggcctgaatacgttcacgggacgggaatggggttacggcgatgaagacccgaaaatcttcaaccccacggattttaatgcctccgatatcgtctccacctttaaaaaaggcggaatgaaaggaatgatttatacggccaaacatcatgacggcttctgcgcctggcccaccaaatccacggaccacaacatcaccaagagcccttggaaaaacggcaaaggagacgtagtcagggaattcgcccttgcctgcaaaaagcacggcatcaaattcggcacctacctcagcccctgggaccgcaacaacgcggattacggcaaagatggctacttggacgtttactataaacaaatccgggaattgctgaccaattacgggcctgtctttgaaatctggtttgacggagccaatggaggagacggctattacggaggagccagggaaaagcgcaatatcggtgacgcggaaaaatactataactttgaaaaaatcgtggaaatgatccgcaaaatccagcccggctgcatcatctggggagcgggccaccacggagacgcccgctggggaggctccgaaaaaggccacgtcaattatccccattggagcaccgtagggctgaacggcggaggcggaggcaccggcatgcgcggcggagaacgctgggtgccggcggaaggagacaccaccatcaaccatgccggctggttctggcatcagggacaggcatcccgcgtcaaatcccctgaagaacttatgcaggtatggtttgattccgtaggccgcggagctaatctcattctgaacgtggcggcggacaaaacaggcagactggatcctgcggatgtcaaatccctgctggaattcaaggaactgcgcgataagctatatgctagggattacgcgttgggagcaaccgtcacagccagccagacgcgcggcaacgacaaaaaattctctccctccaacatgacggacggcaacattgaaacctactgggccgtggaagatgacaacctgacccccaccgccattattacgctgcccaaacccgccactttcgacgtcatccggctgcgcgaacaaacacgactgggacaacgcgtggactccttcaatattgacgctttcatcaatggcaaatgggtttgtatcgacaatgaagggaaaaccatcggcaaccaggtcatgcgccgcctgccccgccccatcaccacccagaaactgcgtctgcgcatcacgggcagccaggccacgccctgcatctcggaattctccctcttccgccagcccgcgggcgccgtacggccctccattttccgccgcggagacaacctcatcatcatcgcggacggcaaaaataaaatcctgtacacgacggacggcagcgaacccaaggcaggatctcccgtttacagccagggtgctaaatttacgaagtgcggcactgtcaaagcccgctgccaattctccaacggtaaactgggtcccgtcagccaggccaaattcggcatcagcaaaaccggatggaaagtgaaaaccgccacatccggaaatgcggcggcggccatcgacgacaacccggaaacctcctggctagccaaggcagaagcgcctcaatcctttgtggtggatatgggaaaaccgtaccaggtttccagcttctcctaccttcccagacaggatgggaaaacctccggcatgacggataaataccaatttgaagtaagcgcggatgggaagaactggacgaaagcggcggaaggggaattctccaatctgcgcgccaaccccattgagcaatccattaatctcaagaacgtgaatgaacccgtgcgttatttccgcttcatcggcaccagctctctggacggcaacagcgcctccgctgcggaaataaacgtcttcggcactcctgcagacaaataaacctcccaggttttccccaccagggcattccggtttttacggccggaatgccttttttgcggcacgaattcatttttgcgaaacaggctccgacacaaaccggcatcaaaacaagcaggagaatataagccggaattcctcccaactcatcctgcagcgcttcagcaggctgggaatgtcccgtatatatcgccgcaacggccaaaggtctaaagaggcggctccggcatggctgccgttttcaacccccgccggtatgcggaacatattgaaatcggaaagagccctgcaaccccatgccaacggcagaaccccggaaaaaacgcctgcttcctgaaatcagccacgatatcatctccggaaggcttctgttccatttcctgtttgtacgaacaatcttctccctgccgtcggaaaacctggagcttttccttacatcgtaaaattctattttaagcaaacccggtcaactcggcaagggacttccgcaaaacagaagctttcctttccaaaaatcaggcatgaaaaagggcgcatccttttggatgcgccctgtacaaatcatgctggcggcgaatttattcctggccgctgaaatcaggcgtgaggatcaggaactggtcactgatgtccttgccccttctcttgggaatgaaggtatcctgaaggttgtcgttgtcgtccagttccagggtcttggcgctctgggcagtcgtgaaaatcagaaccttgccgcggaagctttccgggtcgaaacgcacggcattgccggccacaacggtgctgccgtcttcaccgggaagcacggaagtgaccatcaggggatattcccccacggaacttccaatacccacttttttgttattgtcacccttgcgcatgacgtaggaaatgcccacttcaccgggggtcagggcttgaccgtcgtaaatttcgccgttgggagtaacggtggaaccgccggaaggagtctgaaccttggcgtagaagttgctttcggaaacagactcattgcccagaagctgacggaaatagtcattggaagtatcgccctgaagtgcgcccaggccgctcatataattatgctgggcaacaacgcggtcggcagtgatgtcatcggggaaattgcccagtttgctgttggccttgaactcgttcatcgccacgcccacgttcttcatgttggtcagggcctgcatctggtcgcctttgttgatctggttcaggataggaccataggccacggaagccagcagggcgataatggcaatgacaaccaagagttcaatcagggtaaaccccctgcgtaactggtgtgttgcaaaagatactttcattgttggatatgatggaatgtttacagtttaagaaaaccgtacgtggttatctatgttcgtttctactattaacgcgatttcccagtcaggacaagcatattctcataaaaatcttggtcctgcaaggagagaaaactctcccgcagcccccctgcaaaaggcccggaaaataccgggccatgggggaaaatcctacctgccgctgccgaaaaaggaactcaacccttccaaagctccggcggacggcctgtcctcctcggcaatcacctgccgctggagttccgcgatctcttccagacccttgcggcctaattccagcatccggttcatctgatccgccgtgaacacggcctcttcaccggaaccctgcacctccacaaactctccctggtcggtcatcaccagattcatgtccacttccgcatccttatcctccacatagcagagatccagcagagcctctccctccagtattcccacggatacggcggaaaccagcctcttcatgggagactccgccagctttccttccgcgacaagcttgttcacggcaatagccagagctacggaagccccggtaatggaagcggtgcgggtaccgccatcagcctgtaaaacgtcgcaatccacccaaatcgtgcgctggccgatcttgccaagatccacggccgccctcagggaacggccgatcagacgctgaatctcgctggaacgtccgtccagtttccccgccgtaatatcccggcgtttacggtcaagcgtggaatagggaagcatggaatactccgccgtcagccatcctccttccacacgctgaaccttcatccagcggggtacatcctcctcaatcgtaacggcgcaaatcaccttggtgcgtccgaaagtcaccagcacggaagccgtggcattcggggcgatacccgtttcaaagctgatcggacgcaactggtccacaagtcgtttatcctgacgttccatgcggggaatcatgacggatgccgtcatctttttcaaatggaaagatggaattcccgttccaaaccgctaatatccctcccatgaaacaccctcgtacccgtgtggccgtcattgacgtggtggccctttcccgccagatgatggaacacatgccgcggctctccgcctgggcggaggggcggaacgtttcctccttccctccggcctttccggcccttacctgctctgcccagagcacctacgtgacagggctttccccgcgggagcacgccattcccggcaacggatggtacaaccggaacatgtgtgaaatccaattctggaagcagtccaacaagctggtgcagggcccgcgcctctgggagaaactgagggaacggtacggctccggcttcacctgcgccaaacttttctggtggtacaacatgtattccacggcggactggaccatcacgccgcgccccatgtacccggcggacggccgcaagatcttcgacatttacacccagcccatggaactccgtgaaaccattaaaaaggatctgggagaattccccttccccaccttctggggccccatggcaggaatccagtcctcccaatggatagcggactccgcccggtgggtggaacggaaacatcgccctgacctcagcctcatctatctgccctatctggactatgatctccagaaattcggcccatcctcgacccaggccgcccatgcggcaaaggctatggacggtcttctctgcgacttgatcgactttctggaacgggaaggcgtcacccctgtcgtgctcagtgaatacggcatttccgacgtatcccgcagcattgccctcaaccgcctcttccgggaacggggctggatcaccgtcaaaccggaaatgggtacggaaatgctggactgcggcgcctcccgcgcctttgccgtggcggatcaccagactgcccatatctacatcaatgatccttccgtaaaagaagaagtaaaagcgttgctctccgccacccccggagtggaagaaatcagggaaacggacttctccggcctttcttccgcggctctggaacgcctgccggaattcaccgccgtcgcggcccccgacgcatggttcacctactattactggctggatgacaccaaggcgccggacttcgcccgctgcgtggacatccaccgcaaacccggctatgaccccgcggaaatgttctttgatccgggccttgccttccccatgttccatgccgccgcctttctgctgaaaaaaaagctggggttccgcgccctgatgaaagttatccccctcaatggcgaccaggtaaagggctcccatggcagagaccgggtgccagcgaaccagcagcccgtattcatcggcccggccttcctgccggaaattcatgctgctgaggatgtccatcaagccatcctctccgtctttgaaaaagaataatagcggttcccttcagcgggcatccggacgggggtcatattccaggccgggaacctcccggtaatgaatgccgtcccacaggacgggaatgcagcagaaaaaccagcttctctggccgtcgtctcccttccagtgcccgaacacgctgcggatcaatacacggttcaaccccttgcggagcttgatctttacaggagggcggaaaaaatacccttcccaggtcagaggggcttcctcaatgcgcccctttccccaccccgtccagggcaggctcttgaaaggccacctgggagggttcacgcgccttccgttcaaccatacgtccccgctggaaaaatcccagctttcctgttcaggggcgcgtgcgctgcggtacccgcctgaatgcccccacatgccgttcaggccaaacatcagccacacctcctgctccctggggctgcggatgaaagtcagggcataacaggttccatcgtcctttccaacctcccttgacatcagcgtaggccagtgatccgtccggtactggttccggtgcatgttgaacatcgcaaaaagatgcctgacatgtatggcggcgccgtaaacaggagtcttcttccaggccagtatcctgtccccgtccctgtaggaaggggctattcttctttccggttcaaaagaggtatcattcttcccccggtggtcgaatggccctaccaggctccaggcaacgtccgcctgtttcacataggcaaaaggaacgccttggaaaaaatgatcacgatggaaagccaaacgctgttcaaactcccggaattccttccagccgtccgttcccctggggggaagctgtgccatataatccctcctcttggtagcgcttccgcgccagacacgctctgcaaacgtcaatgcacaaggataaaacggatactgttccagcaccctcatctcactgctcaggtttccgtcgcaccacacgggcataatgacccccaacgccttatcatctccttgaggcacctcgcagggctgctggaaaaacacctggtacacgccggacagggaatccgcccagtcaatgtaaaaaccattgctgtcgatgcgcttcatattcttatccatcctggcgccggcctcgttctctccccagcacatcaatacggaatccttatcgtgcgggccgcccggagaccacacgaccacctccttgcccttcccgcggatatgctccgccatgcgcggaataaaatccttcatggaaatgtgcgcctcgtcggaccccatgtggaaaaacctcccgggaaacagggaaacggcctcgtccacgacatccttcaatatggaaacacccttctccgtctgcatgccggtcttcatggccctggaaaaaggctggctgtgtcccggcatgtcaatttccggaatcacctggatattcagccgggcgcaataatccgtcagatccttcaattgagcctgtgtataaaaccgccccgggagccgggacttccaatgaaaagccccatccgtcagggccggatacttcttcacttccagcctccatgcgggatcatccgtcaaatgaagatgcagcgtattaatcttatagcgggaaagacggcgcatcatctccttgatcaaggcaggagacatgtaataacgccccacatccagcataattccccgcaggacgaaagcgggtttgtcactaatccgcacaacaggcatggcaaattccccttctctattgaaaaccagttgccgcagcgtttgaagggcgttaaaaaaaccgccaaaacttcctgccctgacggttgcttttcccaatccgacggacaggtcatacccctctcctttcatcctggcatccggaaacaattcccatgtcatggcaccttcagcagcccctccactattcagggaaccctgaatgccggaagtcctgaatatgtccttgatctccttcatcaaatcatccctgccaggaacatccggaccaaccttcacatgaacactcctgaaacctgcctcgcccgcgcccctgacgactttggaaggatacggaataagcgcgggggaagaaaactccggcacaggcgcggtaaccacccctccggccagcggcccccatgaaaaataaatcagcaaggcaataaaaaaccgtacgggaatgctgaacactctgaacaaaagcattccttaactacggcattccatctccgctcctgtcaaaacagggctttctcaactgggaaaccaaatgcttttcccatcctctccaacaccgacatgcttgttcctccatatcactgtttccctccgcaaatccggcaacaacgaacgggcgtcttcgctattgtcccgttcattcgccagacagactcctcctgtcagtgcaaacgttccagcagggcatccatgtccatgtaatcctgcccgtgaatcaattcaccgagaatgggcgcatcggaaaactcctccaccatgctcctgttcgtcacgcaggcagtatcccattcatctttcacattattgaacacgatgcccaggcattccaggccgcgttccttgattgcattcagcgttaacagggcatggttgatggctcccagcttgttgccgatcaccagaagaacaggcagcttgaaatccgcagccatatcgctgaaattccttccggggccaatcgggacttcccatcctcccaccccttccaccaccacgcactcatgtgcggcggacaaagcgtcataagcccgcaggacaacctcttcatccacccgcgtattctccagccgtgcggccacatagggacacgtggcattcctcaaaaaaacgggattcaggtcatccagcgtcagctccttcggcccggcttcgcgcaaaaggcgggcatcctgcctgtctccgcaggccacgggcttgaatccggcggcattgatgcccgcttctcttagagacttgatgatcaggcagctcacataagttttaccgacttccgtatcggtaccggtaacaatgaaattcctcataacggtaaatattcagggatgggatcttctaatctcctcaagctgcccgcgggaaggcacgccgtcattcgtggtcacccagtgattgatgaaagaccagataatcacggccagaaccagacagaacaacttggcaggccaattaagcaatagcagttttttcattggaagaagaaatattcagcagctcttcaaggcgtcccttcaactgttccggagtcaggttgcgttccagcttcccgcctacggccaacgcgatagcccccgtctcctcggacaccaccaccaccacgcagtcgctctcctcggacatgcccacgcccgcgcggtggcgcagccccagggtacggtcgctcatttccttctgggaaacagggaacacgcaggcagccgcggaaatgcggtcgccggaaatcaccacgcccccatcgtgaagagccgtcttggtatggaaaatcgtcagggccagttccggagaaaaaatggcgtccagcttcacgccggaatcctcaataggcttcatgctgatgctcctctcaaaagcgaacagggcgccgaaccgctggttggaaagcttgcttaccgccttgcagaaattatccagaaaatccacccgctgaagcttggcgaaggaagaaaaaaacgggtggcttcccagctttgccagccccacgcgcagctccggctggaaaatcaccaccagagccagcgccaggccgggggcgaaaatgcgcgtcagtatccacgaaataacattcagctgaaagaaaaaggccagcaccaccaaggccagaaagcaggcgaacagccccaccatgatgcgcgcgccgcgcgttgcgtggaaagcacggtaaatctggtacaggaacacccacaggatgaaaatttcaacaaccgcccggagcgcatccttgatcactatccagtcccacatgcccaacaggctacacaacaacccggccgaatgcaataccgatcctttcgcgttgccggcaggctccgggaatttaccgttcatctcagttccccgaatttgaagacatctctgtacgttccggaaacaggtagaagttcttaaaaagaagagcggttctttgggaaataaataataacaataaataaaaattagattaaataaacaatgttaatccgcataaagcaaggcttcagaaaactgaaattctctctggatttacggcatgaacttgcggcggatacactgaaaaaaccaaacaaaaaaaataatcaccaaatgatagcaatcgaacaattaaaagaagtaggaaaaatctggctcgcctgggtaaggcttcaggatcatgatcctgccgaagtcacacaaatatttgaaaaacttaaaggagaactggatgtaaaattaggaagaggctggcaaaaatatgacccggtaataaaaaaaggaaggccccaatcctataaaaaactctttcaagaattggatagtgacagtcaggaatccgcaaatgcattgatccaatatttcaatgagggaataccggaagacgctcctgtctcgccagtcatacacctcattctcatcttatgcgtctgtgaagtaggacgtggatatggccaggcgccggacaatatgctggcttatgcacatgatctcattgattatcccaatctcacatggagctcactgctggacacagcgggaagttccccggagttcgcatttctatgcaagggtgattccgatgaagactataaggaataatgcatgagcgccgtccgcaaccgactcaccggtgagcctcccgcacggcatgggttccctgtatccgggcacagggaacttcacccccatcgtcggcaaaagggacagccgcaggcgggctcgggcaattcagaaacataggcggcccttcctgccttccatctgtctcaatcctgcggacatcaaaagttggtacatcaacttttctcatcacctcaatttccgggccaaaaacctggccgccgtcatgataacggacaccttccttttccggaaaccgaactgccatcaacaggaaaccttccggaaacgctggattaccgccgcatggggcagatgccccagagcgacaccaggccgtcctgcatctgacggcgggcatcaaataaaacgcaggcggcccctacgcccggcagcctcagacggcctgcccgtccataatcgtaataatgcggtcccctctccgtgccagatgttcgtcatgcgtcacaatcaccagcgttttgcgggactcgtccgccaggccgaacaaaaggtccagcacctccgcgccgttcttccggtccaggttcccggtaggttcatccgcaaaaataatgggggcgtcgttcgccagggcacgggcgattgccacgcgctgctgttccccgccgctcagttcgctgggcaggtggttcaggcggtgggacaaacccacgcgctccatcagttccctcacatattccacgcgcggcctcctgccgatggaggaagccagacaggcgttttccagcgccgtcaattccggcatcaacagataattctggaaaataaaccccatgctccggttccggaacacggaccgggccgtggcggacaaggcgtaaatatccgtgccgtcaatcgtgacctttccctcttgcggcgtttccaatccggccagcgtgtacatcagcgtggtctttccggccccgctgggcccgcacaggaacaccttctctccggcggcaatgtgcaaatccaccccatgcaggatctcaatggacttcttgccgatggaatagctgcggtggaggttggaggcggtaatcacgggcgcagtataagaaaatccttgccgtattaaagttctatgttgtctataagacgcacgtcgccgaaatagacggcggcggccatcagggccggcttccggttctccgccaccggctgcatggtctccgcatccacaatctccagataatcgatgcgcgtgccgggcacaccctcaatcatggcggcggcatgctccttcaccttggaggcgtccgccccggcctggaactcgtcccgggcctgaagcatagcctgccgtattaccacggcctgttccttctgctccggcgtcaggcgggcgttccgggaggaataggccagaccgttgccatgccttacaatctccgccccgtgaatgcgcaccggaaaatccaggtcgcgcaccatgcggcggataatggcaagctgctggtaatccttctttccgaaaatggcgtccgtgggctgtaccaggttgaacagtttggcaagcaccgtgcagacaccggaaaaatgccccgggcgggacgcaccgcacaatgttgcggacaaaaagctttcttccacggcaatgctgcgttctccggaatacatttcttcaggagcaggggaaaacacataatccacgcctgcaccttcgcacacctccaaatccttttcaggagtccggggataagtctgaaggtcggaggaattgttaaactggataggattgacgaaaatactggcaaccaccacgccatcctccccggccaacttgcgcgcctgttccagcaaagcgcggtgtccggcgtggagggcccccattgtggggacgagaaccacatggtcatgtttgcggtggtgcttgaggagggcagccctcaactgggccttggtggaaaatgtttgcatgcgcctaaagtggccccttgatgacaaaagttcaatcctgaaatattgctagaaggttgacgcatgccattccacatgtaaactggtaaagtcagaagacgctaaaaattatgagattcttcaaaacagcattaggtgtatcagcagcaatggcattaagcgccacggccaacgctgaacttaaggtagcgacggtggatgtgcagaaactctttgccgactactacaagacccatgaagcccaggcggaagtagacaaggctgcccagacggtgcaggaaaccaacaacacccgcgcggaaaccatcaaaaagatggaagcggacttcaacgacatggtcaaaaggcttcaggatcccatgctgaatgaaaaggacaaaaaggagctggagcaaaaggcccagatcaaacgtcaggaagtcattgcgctggaacaggaacgccgcggatttgtggaacgccagcttaaatcccttcaggaacaaatgaaagtgcgttccgccaaaatcatgggagaaatcacaaaaatcacggaaggcatcgccaccaagggcaactatgacctcgttctggacaaaagcgcccaggcccttcggtccaaccaggtattcgtctacacgaagcccggcatggacattactcccacagtgatgaaagaactcaacaaagacgcccccgaagggtttgacccctccaagaaaaaggctccggccgtccccgccgctcccgcggccccggccaactaacccttgacattaaccccgggaaggcggaatcatatacccatgaagcttacacttgaagccgtggccgccctcaccgggggaaaaatcctttccggcgaccccgaactgaccgtattcggggtcgcttcccttcttgacgcatcccgtgaagaagcctccttccttggcaatgaaaaatacttccaggacttcctgcacacctctgccggaatcgtgctggtgccgccgggtctgcctgcgtatccggaacacgccgccttcgtggaagtggacaacccctccatggcattcaacgccctggtgaaatatttcatggcttccgcctaccggttcacccccggcattcatcccacagccatcatcgaccccacggccagcttcaacccggacaaaatccatgtaggagcctatacctgcatcggggcccactgcataatcggagacgggacggacattggcaacggctgcgatatcggagacggcgtcaccatgggggaaaactgccgcctgcatgcccatgttaccatcagggaacgctgcaaactcggcaacagggtgaccatccagcccggagccgtcatcggttccgacggattcggcttcctgatgggagacaatggacgctacgtgggcattgaccaggtaggaattgtggaactgggggatgacgtggacgtaggggccaacacaactattgaccgcgccagattcgggcgcaccattgtgggggaaggcaccaaaatagacaacctgatccagctcggccataacgtcgttgtcggcaggcattgcatcatcgtcgcccaatccggcatagccggcagcaccaaagtgggggattatgccaccatcgccgcccaggtcggcatctcaggacacctcaacatcggttccaaatccacgctgggcgctaaaacgggagtcatctcggacattccggaaaactctacttactggggcatgccggctttcccctacaaggacgctacccgccaatatgccgccctcaaaaaacttccggcactgattaaggaagtccgcgcgctcaaaaaggagctggattcttccggcaaataacgggcaccatatcgccggaacgctctgcagcccctctccgtgtttctgttcccgccgcttcaggcctgtcctgtcccccagcggcggtgcagaaaccgttccagaggagaaaacagaatcttgtcggacagcagcccaatcaccacaatcacgaacatgatgcctacgacctggttcatcgcgttcagttcgcggccgaaatgcagcagctggcccaatccgaacccggtcaggatgggaacaaaaatttccgcagccatcagggagcgccaggcaaaagcccatccctgcttcattccgctcaccacaaacggggcggaagcgggaagcgtcacatgaatcaggcaataaatgggtcctgctcccatggtgcgcgccgcacgggcataaatgggcggcacgttccgcatgccgttggccgtagccaggattacggaccacagcgtccccataatcaccacgaacagcatagccccttccgtctggccgaaccacagggttgccaacggaacccagcacacgctgggcagagcctggaaccccagggaaaccagccccagagtattctgcataagctggaaacgggagcacagcatgcccaggggaatccccatcaccaggccgattccataccccatcaccagccttttcatggtaatccatgaagcctcctccagagacccgtcctgaaatgaagagcgcagatactcccatacttccagcggagagggaaacaaataaggcttccagaccctcaggtcgctcaaatgctgccatgcccagaccacgagaataaaaaacacgagcgaacaggcgtgcgccccccacttggaccatttgttcctgttcatgccgtggctcctttcaaatcacgggtaatgcgggcggacaattccgccaaatcactgctgttgatatccctgggatgaggaaaattcacgaaatattcctcacagacgcgccccggatgtggagtgagcaacaccacacgatcccccaggcacacggcctcgcgcatattatgcgtaacgaaaacaatcgtcatgccgcagcgtaaatgaatctcctgaatatcctgataaagctgttcgcgggtcatggcgtccagggcggcaaaaggctcgtccatcagcaaaatgcgggggctggtagccagggcgcgggcaagcgccacgcgctgcttcattccgccggaaagttcatgaatatgagcatgggcacactctttcagccccaccagttccagattcttctccgccatggcaagccggtctccccgagtcagtccgggcaccagcttcaagccgaacatcacgttccccagcacatccagccacggaaacagggcggactcctggaacatcacagtgcggtcccgtccgggttccgtcacaggctccccgtccagctccaccaccccggaagaaggaaactccagccctgcaatgatattcagcagggaagtcttcccgcagccgctggcccccaccaggcacacgaactcgcctcctctgatattcaaattaatgccctccagagccaccacctttccgcgcctcccgtcaaacaccttgctcacgccggcaatacggagcttgcagcctccggggccgcaatgttctgcacccgcaatcatcttccgcccgcctccttcgccatggtcaactgctcctccgccgcctccggcaccaccagtccgcctacatccggaacttctttcataaatccggcctgatgggcgtcctgcacaaactgccggagcttgggaatggaaatcctgtccttgatgacgatgcttttccaggcctccgcaatcaatgccgggtctattctggaatgcgtcagctcctccagctccctgaccacgattgactggacctcatccggatgcagccttatccattcgttcagctcctcatgcgcctgcaccagggctttcgccacctccggcttttccctgagaaactccgctccacataccagcacggtcgcgatggactctttctcgtccaccagcaccctgcctcccgccgtcagcaccaggcggctcacccaaggttccaccgtccacacgccgtccagcttgccctgccggaacaggctgagctgttcggggttgggagttggcagaatagtcacgtccccgccgcgctgcgtcacatgcaggccgccgcgggaaaaccaggcgcgggcggaaacatcctgcgtattccccagttggggagtagcaatcaccttgctgcggaaatccgcaggctccttcagcgtggaatccttcggaaccaccagggcggcacctccttccacagctccggcaatcatcctgatatcctccccgcgggaacgcacaaacgcattgatggccggactgggccccacataagccagttcaatggaccgggcaaacacggcttccatggcgctggggcccgcattgtacacgtaccagttgatcctgacatcctttccggtagcctccttcagccgttcttcaaaccaccccttcccctgccgggaaaaatgatgcgccaccaggccctgcacatgtgtcacgttgggaaaatgaccgaaattcaactctacgacattgggatcttccttctccttctttccgcaggaaacagccagcaggcaaaaaaacagggccggtaaaatcgtcaggaatctggaacgggacataagcaaaaagaatggaatactgaggcacagccgtttttccgcggcctttcaggcaccgactagcagaagaagccgcccgaggcaagaagccgaaggcaacaactttgtcacaatgtggacagcaaaaatgcccgttttgttgaaaaacaatcccgatcccggatctgaaccgggctttattgacaaacctgcacgttcccgttacaaaagcaccattcccaacccgccatgcaatcctcccccgaccagccctcatccggagcatggctgggccttcctccggatgaagaacgcccggtaagccggagcgtcaggtaccgttgcatatttctaatgctcctgtattggtccgttctttccgccattccccaaggcgcggaccgccttgcagagataggaacaaatctccctctctggatgggagccctggaactgactcccttcctgctggtgccggccttcctgttcctggcggtgcgaacaggagcccaatggagagccttgatgataaccgtatatgcgggactgttcctgaacctgctgatgaacatggcgcttccctcaggcgccatgtggggcgaccttcccgcagccggcccctacggtacgcttgtctggcccggagaggaccaccgggaatggctggtcacgctgccccgttttcctcaattctgggctctcgtcatctatgtcttcctctccggcagcggaacccctcccctgcttcgcctgctggccctggcctggtggttcctgctttgcgtggcccccgtgaacacgggcatggtggggtatgcggacatcctggggcctctggtcatcatcgcccttgtcctcggctgcatgcacctggcggaaaaaagagcctcccggcaaaccaagggctaacaatccagggcggccattccacggaagaaacagccgacccagggccagaggacaccaccctgcggaaaacttcccagcgccatccgttatttccagactacttcaaaaatatttacggaacttcccttcttcccggtcaggccgagggccctcaccggctttttgacggatttcaggctgaacgtattaactttcctgcccttggccagattgcccacgggaacccaccgtccgtcagccccacaggccagcacggaagcctccttcccgtcggacaggacaatgacggaacccgcacggggaaaatcacagggaatctccgccctctccggagacagctccacctggaggaacgttgccaggttgaaatccccggcagctccgctgtcggcggacttcccacccttgttggcaagattcagccggaactcttccagagtcacctcctgcggggaggaggaggcgttcaacagcctgatgcccttgatcactccgccaatatccgcggaaccgtcctccttcaacggaacctccgcccaggactttccatccatagaaatgaacaacttggcccacttcatatccggcgtcttcaaattgacggaggcggactccacggacgctcccgccggaatttgaaggcccagggactttttcggcggcaggggatgcacctccatgatgcgcttcagggaaatatccctgtctcctgcttcaaccacggcattcctgaacgcgggagcatccgtcagtacggaaggcgctgcaggagcattcaccttgaaatcccggatggccgtccacacgtccggcttgcctcccggaaccccctgcgccgtagcgcggtaacgcacaaaccggccttttttgccatttccccggtactccacgcgcagcccgctggactccggcatcaggggagaccaggactgcccgtccagggaaacctccaactgtcccctgttcacagcgtccgtatcggaatcattgcggcccatcacaatggaaacggtgcgtatctcccgtggaactcccaggtccacgccgaaaaagtcacccttcttctgaacctctttgcagtaatagaacgactcggggtcgtcatccagcatcttctcgatgccaatcttggacttggtggaaacataaggcttcacacggccaacggcctgcccgctcacgcgggaaagcacgggggtggagcccatgtccagcagttcccgcacagcgggggccatcaccagttcggacggcttcacggcggtttgccacggggaattcttcttggtcacttccgtgacgtgcttattgatggccttgctgatttccctgctgtaacgctgcatctcggcaagcaggcaggcggcctccatggcatgattcagcgctccggcggcattccccgcctctgtggcctcaaccatgcgcatactgttcaccccggctttccccagggattcgaactggatgagccacggctccacctctgcaacgaaagcgggattattagacttggcccgaatcgcggccggagcttgggctatcttcgcgaactcggccttcaggcgatcaaacgccttgcttccagacaccctggccccgcggcggcacagctccagcacctgctccaccacgggggcaatctctacggactcctctttgcggtaattgtgcccgctgggccccccgtcgctattatgatcggaaaacgtctgcatggcggaggagcagccggggaacaaaatacggatactgtccttccatgtcctgtcggaatcataggccttggcgttccaagtcatgttcgccacgctgaacagggaaatcttggaagcctccggcttatccatcggattggaagcaaacccctgcataaacggcatcgcgtccgcatccacgccataggtgcgccccaaaaacagggcatggcgcacgtaatccgtcaccgggaaattccaccagataaacgccggacgcttcaaatacttattaatccccttcaaagcaggagtccggatatcgctcacaatgctggaaccggtccacatgatgcctatatccttgtccagatgttcccccattacctcatggtagcggctaccaccgccggaatacgccgtggggcatacgatcaacggcgtcacatccggttttttgtggataaactccttattcaggtaattcaaaaactccacctggccctccggtttggccccctctccgccgatgtcgtcaaaaaatacggcaaaggaacggaatcccagatcatacatcatctcaaacttcttcacggccgccttccggtccgcctcgccccagtgaatatccgctccgggatgcacggcccagacaaaattcaccttattctgcttcgcgaccttcactagctctttcaggtccttcgccatatctgcgggataaggctcgcgccagcgcttggaaaaaccgtggaacacgtcatccttcgggccgtagatgtaagtattcatcttatacttcccgtaaaatttgaactggctgatgcgaccttcctgcccccagggcagaccgtaaaacccttcaatggtaccgcggaaaggaacatccggccaatccaagacctccacttccggcactgtcacgccggaagaagtcttctccgccaactgcaacagcgtctgggccgcgtaaaacaggccttcgtcgtcataccccgtcatccgtattccctggggcgtaacgctcagggaataggccccggccttccggggaacattaccggcaggctttttgcttcctttgatgatagtcatctgcacaggcagcccgtttggagcgagggaaaacatgcttttcagggcattcacggtaggttcatcccgcgcgcccaacagcttcagggccggaaccgtcacggaaccaccgctcctggtcatcttctgcggaatgggatacaccggcatcttggccgtttttccggcacgggagccttcaggagaggcggaaaaagccggagaagaagactgggcagaaacaggaagggcaaggccggcccccagcgcggcggcagccatcatggattggaaaagtatcagattcatacgtgcaaaaataaaaagcctgtacaggccaggttcacgagactacggccggattgttccacttctaacaggctcctctccgtatgtcaaaatactttgccccgcaccggtaccatgtcgcccgccccgctgcaggggataactccagggacaaaccgcagtgattttccccaagcaactattcccggcctacagccttgccgccacttcctccaacgtctccacacgggccgtggcgagggtgggaacatcttccgcagaaaacaggaaattgcggcctactccggcggcaagagccgcccggatgtcccgctcccggtcacctacggacacgcaggctttcatatccagcccatgcgcggcggcagccttcaaaaacaggccgggattcggtttccggtcgggatgtccgtcatccgcgctgggacagtgaaacacacctgcaatctccgcaccggacgaacggaacacccctctcatatattccgtcaaccgctcaaagtcatcttcagaaaacatgccgcgtcctatgccggactggttggtcgccaccagcaccagataccccttctctttagcctggcagcaaagattcagaattccgggaaccagccggaagtcctctatgcggtgcacatacccgccatccacattaaccacgccgtccctgtccagaaacaaagccttacccgccatatatctcccgttcaaccagttcgcaaaccagatgccccactgcaatgtgcatctcctgaatgttgttcgtggcatcggaaggaacggcaatgcaaaactccgcaacttctttcatctctccgcctccgcggcctgtcaaggccaccgtccggacgcccatccggcgcgccagctccatcgccaaaacgatgttccggctgttgccgctcgtggaaagccccaccagcagatctccgggacggcccactccctccagctgcctggaaaacaccgtctcataaccgtaatcattgcccacggcggtcaggatggaagtatccaccgtcagggccagcgcattcatggcggggcggttcagcttgtaacgccccaccaattcggcggccaggtgctgggaatccgcagcggagcctccgttgccgcagaacatgatcttattcccggccttaagggtatccgtacaaatgcgggcaacctgttcaatatccccggccatggaagccagggctttgaaattgtccgctatccctaaaatctggttcctgatgtattcgctcattccgggctgcttttcatgcggttgatgatattggtggaggaaaaaccctccaggcggggcagttcaagagcctgccctccataagatttcacgaactgtccttccggccagcattccaagggatacccttctttggcaatcacgtccggacgcagcttctcaatcagaggcagagccgtatcttcatcaaacggcactacataatcgacaaaatccagggatgccagcaacagggaacgcatctcctcattattaatcggcctgtcctcgcccttcagccgcttgatggaggcgtccgtattcaaccctacgaaaagcacgtcgcacgcttcacgcgccttcataaaggaatgcagatgccccaggtggagcaaatcaaaacaaccgtttgtaaatccaaccaccttcttctcacggcggaaacgttccgccagctccgccgcggcctccggcgtcaggatattgtcgcggtgacgccaggagggcgtctggatatccttctccttcaacgcctccttcaattccgttccggtcacgctggccgttccgaacttgcccactacgatgccggcggccacattggacacgaccagagcatccggcaccgcggctccggcggccagcgccgcgcccagactggcgagggaggtatcacccgcaccggacacgtcaaaaacatcccgggcctccgtaggaatgcagacaaaatcggaagggctggaggaaggaatgaaaatcataccgtgttcgctcaaagtgacaatcagattctcaatgccgaattcggaaaacagcctctgcgcccccgccacggcatcctgttcccacccgtccatggcaggattgagcgccacgccggtagcctcctggaactccttcatattgggtttcaccagcgtggcccgcctgtagcgggaataatccgctcccttcgggtccacaatgacgggcttgcgcgccgcacggcaccgggcaatcacatccggggcggttcgtccgtcaaacaggcctttcccgtaatcggacaaaaggacaagatccgcctccggcaaacaggcatccactcgttcaaaaaaacgggaagccagctccggctccatcctcagcggctgttcctggtccgctctcagcaaatggtgcttgcccgccacaaaacggatcttcacggtcgtctcgtacccttcgcactccaccagctccggaacgcagtgcgtctcttccagaaaacgccttacctgccgcccatggccatcatccccgaccacgctgataaaagtggtgcggcatcccagcgcgcacagattggacacgacattgcccgcgcctcccagcatgcgcgtctcccggtccatcttcatgatgggaaccggagcctccggcgaaatacggctgacgctcccatacaggaacttatccagcatcacgtccccgatgcagagaatccgcacccgggaaaatccgtcaatcaatgtatgcagccggttcatgggagacgcctctttctaccacgccccctgttataaggcaaggacagttgaaccgcgctccggaaccggaaaacggggcaacgcggccgcttcccgccgttccggacggcagaactctcattcagtggcaaaaaataggtcagtcatgataaaaatcttgacctgtaagcaggaaagcactacctattgtctcccgttcccggacgaatagaaaaaggaaaacaaatcatgcgtgaagttaccgtaagaaaaggtgaacctatcgaccgcgctctcaagcgcctcaaaacaaaactggatgttgaaggcattctggatgaaatgcgccgccgccgcgcctttgaaaccccgatggacgaacgccgccgcaaggcccgttccgccagcaagcgcaacaaggtaaaatggcgttacagcaacaagagcgaagaaaccgcttccgaaactgctgaaacacccgcttccgctcctgaagcttaaaacagtattagttcgggaataagaacccaatttccatgagggcaaccctttctcaaggattgccctttttgcttccctctgcacatgaatcagtcagcccagctcttctcccgcgcacgctccgttatccccggcggagtcaactcccccgtcagggccttccgcaatgtggacggggaccccttctttgttcaatccgccaaaggagcctacatcacggatgcggacgggcgccagcttattgactacataggcacatggggcccggccattctgggccacgctccgcaacccgttctggacgcagtacatgccgccgtggacagggggctgggctatggaattcctgcgccggcggaagtggatatggcggaaatgatcacggacatggttccctccgtggaaaaagtgcgcatggtcaactccggaacggaagcaaccatgtctgccatcaggctggcgcgcggctataccggacgccgcaaaatcatcaaattcatcggctgctaccacggccatgtggactcccttctggtagcggcgggttccggagcgctcaccttcggagaaccggacagcgcgggcgtacccagggaaatgacgcagctcaccctcaccgtgccctacaatgaccgggaagcagtaaaaaaagcctttgaactccatggaagcgacattgccgccgtcatcctggaaccctttcctgccaatgccggactctactttccgcaaaacgacttccttcacttcctgcgggaaataacgctccgccacgacgcccttctcatctttgacgaagtcatgacgggcttccgggtcgctcccggaggcgtgcagcagctttacggcatcactccagaccttacctgcatgggcaaagtcatcggcggaggcctccccgtgggagcttttggcggccgctcggaaatcatggactgcctctctccgcttggccccgtgtatcaggcgggaaccctgtccggcaatccggtcgccatggcggcgggattggcccagctccgggaactcctgaaagggaacgcctatgaacgcctggaacagctcggagcgcgcatggaagaaggcatccgcgaagccctcaaaaaacacggcagaaattacaccttccaccgtgcgggctccatgttctgcctcttcttcacggaagaggaagtctataatctggaatccgcgcaaaaagcttccaaaaaactcttcaaatccttcttctggaacatgctggaacaaggcgtctacttcgcgccctccccgtacgaaacgggctttatctctgcagcccatacggaagaagacattgaccgcacggtggaagccgtccgcatcagtctctccaggctgggttaacatgcccctgatttgaagtgacagctcacgacccttcccctataaggacttcatgagacaaatgacaggaaccatgctgcttctgtcctcagcagtcgttatggcagctccctgggcgcatgcggaggaaaagacaatccggctcacggaagcggaacaacaggaaatcaagacggcaaacgaaaaactgctgggccttaccctccgtttcctgcatgactcctggccgctggaaatcatgtttcccggagaagtgcaggaggaattccactccattcttcaatgccatcagatgctggaacaattccgccaaaccggcaacctcctgctccagacgccggaccgtaccacgcctctgcacctctgcattgccctgggattaaaccgactggccgtccggatggtagaggcgggcgctcccgtcaatgctcaatccattttcatgcatgacggcacaaaagagccgggagacacccctcttacctgggcgtgcctctcaggcctctatatgaattccaccgcggaagaaaggctgccgttggtgcacgccctgctcaaacacggcgccgacccggatcagccggggccttggggcgtcaccccgttcatgtattccgccgccctcaatgactccgatccgggccaggaaaaaatagcgctggcgctcctggacgcaggctccccggacctcaagcgcagaatgaacgcacaggcgcgcggagtcggcttcctcagcctgtcccccgccatttacgaacggctcatcaaagccggctgtgatgttaacgaacgcttttttgaaagcaagcaatcacccctccacctggtctgcaccaaggaaaaaccggcggaacgcctcattcctctcattgaacttctcatcaacgcgggagcggatcccaaccagccggacgtggatggcctgactccgctgatggcttgcaactctccggaaatagccgtttgcctcatgaatcacggcgccaatccctctctccgcaacgatgacggccagacagcctatgacttccatatgaaaaacgggtatccccccattgcggaagccatcaaacactggcagtccaagcagaaaaaagaggaagcccgctaaatagcgggcgccatcgccggctttgcccccctccttctcctactggtgcgggaaagaaaagcggataccgtcacggcccgggaacaggtggccggaaccctctccccggaacagccgtgcttccgaagccatgcaggcagcccaccctgtttcctgttataaaaaagccgcttccccaattcaggggaagcggccttgaaaccacaggaagaaagaattattcctccgcttcaatgccttcgccaatcatcttgggatcttccggcattttgcctgttgtgaagtaaccttcaatttcctccagggaacgccccttggtttcaggcaggaagaaggtcaccgtaatgaaatacagcaccgtaatgccgcccagcgtaaagaacacgccggaataaccgcagctgcccacccacgggaggaaagaaccggcgataaccgtggaaaccagctggttgatcaacagagcaatcgccataccgttggagcggatgcgggcgggcatcagctcggacagtgccagccagacgcatacgccggggccggtggcataaaaagcaataaagataatgaagaacgcagtcacgccccagcccatggaggtatccggcttttcgcccaattccgccttcagaatggaaacgggcttcatggcataaccgtccttgccgttcaccaccattttattggtggaatccggaacggccttgatcacggccagagaagccttgtcctcttccttcttgatatccttggtatccttggtcagttcggaaaactctacgacggaaagctgggtggaagaccccatcaggaactggtaccaggcgggattggcttccggctggtcataggtgatgatgagctgcatcctgttgatgtccttgtcggccatgccgttcttggcaagaagattcctgatgaagggggaatccggagtacgttccaattgaagcgtgcggatggaacccacatccttgccctgttcaaactccttctggacggaagggctctgggcggccagcagggcagccacatccgcagtcacatccttgcgggctttttccacattattgaacaggaacccggtgccaagaaggccgaccacgatgccggccgttccgattttaagcaggaacttgcggcccttgcggtccaccagcaccatggcgacaatagtcatcaagcagttcacgaccttgatggtaaagtctgcccagttggcggtggtgccttccaggcctgcctgctggaataccttcacggaataattcagcacggaattaatgcccgtagcctgcgtaaacgccagaacgagcaccgccagaacaaagggatagatatacttgcgttgaagaagggactcgccggaagagctctgctttttgagttcctccgccttctgcttctcttcctcttcaatgtggaccatttcatcaaacacttccttggcgcgggcatccccgtaactgcgcaccagcacagccatggcttcatccttgcggccgcggcggaacaggtagcggggagattcgctcaaacggaaggaaccgaaaaacaggaacaggccgggaatggcgcaaacccagaaaatagcctgccaggccagaaccttggcggaagtcagcgattcttcgctcgcgccggaattctcgacgccgcccacataactggcggcaagcaaaccgacgacggcggcaaacaccaggcccaccgtcagcaggaactggaacatccccgttcccttgccgcgggattcggcgctcaggcactcggccagatacagcggaacgaccacgcccacaataccggcgctggcgccctgaagaatacggcccagcaacataatgccgaatacctcctgggacaggcagatcacggggatgctcgccgtaaataaggctgcggccacggtaatcaacgccttgcgtcccatcttgtcggccagatagcccgcaaacagggaagaaagaacgctgccgaacagcacggcggccaccacctgggaaagctgggagggattaaaaccggccgtctgctcaatgtagggaagcgcggcagcaatcacgccaacgtccacaccgtagagcaggccgcccaaaccggccatgatgaggagatagcgcatatatcgcctggccgcatccggaacggcggctttcatgttttcttggtctgtcatggtcgttgcattctagtaaattggctcttctccgcaaccaaaaaagacacttcccgggcaaaaacaaatttcctacccggaaatgcgttcaaatggtgaaaatatcgcaaaagaaacaagtaacaaactgtccgaaaacaggaaatcatttggacacctctgcaaaaaagccctcatgcatcccccggctccgaaaaacagccatgggaaaattccggagccgcacttcaatccccgtaaaccgtccggaaaaaactccccttccgtattggagccagaaaaacagcgcgatgcgccatcacggaaacggaagccgcccttaccggcctcatctggcggaagaatctatcccaagccgcttttcaatcaggttcacagacaactccgcgcacaggcgcaattcgttatcggcgtcatgagtgaaagccttaagcgcggacagggaagcttccgaaccgatttccccaagaatgcgggcggcggaacgtttcaaaacaaaatcgtccgactcattcagcgaacggatgatatcagcttctcccgttgggccggctgccttgcattcgtcctcccacttctggggatcctttttccattcctccagaagcaacgccaaacttctcttttccgaaccatgcagtaaaaacctgatcagagacgccggaatttcgcaatccgccttcttcagctccgtagccacgtaatcaaccacgcgctgagcctcctcatgatccggttccgcccataccacaagggccgaagccaacgcggtcacatattccgcatcacgcccccacggttcccggagaagctccaccagcctggaagaaacctcacctcgcatcttatccggattcacagccgacaaacgttttgcagcggcaataacgcgacggatgtccagacaggacagctccttcaaattggccagcacgaaatactggtggcgctcatcctgcaacgcggcggaagcgggccgcgcttcaaacctgtcccggttcagaatcacttccacaaaaaaacgctccttatcctgcagggacaccttccccatcttgcccgcaacctctacaaattccttaaacgtaatgggagtgggagtaataacgaacagtccgccgcccgttcccttgcggtcataaaaaataggttcgtcctcggactgggtcatcctcttcaaatacgcctttaccatatcccggttggctgcattcaccccaaccacccatacgcccagaaccccctgggattccttgcggtcaatagcggaaaacagaggtttcaaatcaccgtccccataattctggacagaagcgttcttggagggcagctgctccagccccatgctggtaaagccggagacatcttcttccccggcgctcccctcttcatgacctccgagcagggaaggattcaccttgaccggatacacgaaaggcagggaagcaatcccccctgcaaccagcaaccccagcaaaatgaaaacaatcttgtgcctgcgtccagcacaggccatcaagcctccggcaagacaggcaaaaaacagggcaaacgccttctgctggggctgctgcagcatggaaaggaaaaaggtcccatccatctcggaagaagcattgtaaaaaatccagacgcagccggcggcaacagccagagacgcgcaaaggcacaccaattgaatcagccccgtttccaccagggcgctctgaatggcttccctcctgtctttgggggaatggacggaaacggctttcttcgctttggcaaaaggtttcttaggaatcagtttttccctgtcgcaaagaaattcatgcccgcatttgctgcaattcaccatagaaccctccgcggaagaaggcacattgatatgtcgtttgcactgtggacaattcagattcaccgggctccaatatgcacgtttttcattcttttgcaatacctgtcttcccaactttcctcttaccatgtaccccgcgaaaatatgcaagaaacttccatcggctcctatttccatcatttctccttttcatttcgactctctgatttttttctgaatgtaaaaactcgctcaaaccgctctcattgaaaataacatttaatcgaaaaccattccgcaaacttcggaaaacaaggtaaagggaaaattcccatcttcccctggcgaaaagctggaaatttttcagtctcccttatcaggggctcaatttccaaacgcaccttgatataaattatttgaattttacaacacgggccattggaaaaagataaaaacgctcttcatgctcctcttcccgcctcacgtcattccgagtgaacacgcttgcagaagaggaaatttggtagtagaattttcgccatgtcattgcagcctgccgaacgccgagatttcatccgcgatatgatttctgatgaccttgcctccggcaagcatcaggccccggtaacacgctttcccccggaacccaatgggtatcttcatatcggacatgccaaatcaatctgcctcaacttcggcatcgcccaggaatttccgggtgcgcgctgccatctgcgttttgacgacaccaaccccagcaaggaagaccaggaatatgtggacagcattcaggaagacatccgctggctgggctttgactggggcgataaccttttctttgccagcaacatgttcgacttcttttacgaatgcgccgtttccctcatccgcaagggattggcctacgtagacgaacaaacggtggaggaaatacgcgcccagcggggcaacgtgaacgtgcccggacaggaatcaccctaccgcaaccgctccgtggaagaaaacctggcacgcttccaggccatgaaaaacggagaaatcccggaaggcagagccatcctgcgagccaggatagacatggcctccagcaacatgaacatgcgggaccccgtgttgtaccgcatcatgttcgcggaacaccacaacacgggcagttcctggtgcatttaccccatgtatgacttcgcccacccgctggaagatgcctacgaacacatcacccattccctctgcacgctggaatttgaaaaccaccgccccctctatgactgggtcattgaaaactgccccgtcccggcacgcccgcgccagacggaattcgcccgcctgaaccttacctacaccgtcatgagcaagcgcaagctgctgcaactggtgcaggaaggacacgtctccggctgggacgatccacggatgcccaccgtctccggcatgcgccgccggggctacactcctgccgccatccgcaacttctgccacaccataggcatcactaaattcaacggcttcacagatgtggccctgctggaatacagcgtaagggaagacctgaatgccaacgcgccgcgccgcatggccgtgctcaatcccctcaaggtcactatcaccaccctgccggaaaacgcggaagaaatggctgaagtgctgaacaatccggaaaaaccggaagagggcgtccgccgcctccccatcacaagggaagtctggattgaacgggacgacttcatgctggaccctcctaaaaaatacttccgtctggcccccggccgcaccgtacgcctccgggggggctactgcatcacctgcacggactacaagcaggatgcggagggaactatcacggaaatcttctgcgaacacattcccggcaccatcggctccaaccctccggaaggaatccagtgtcgcgccgccattcactgggtaagcaccaaatacgcggtggacggagaaatccgcatctatgaccgcctttttacggaagaaaacccggacgctgctgaagaagggttcctgtccgtcatgaatccctcatcgctgaccgtcatcacaaacgccaagctggaaccctccctggccggagccgaaccagaattccgctgccagttcgaacgtctcggctactttgtggcggaccgcagggaccatgtaccgggccgtcgtcctgttttcaaccgcacggtggctctcaaggactcctgggcaaaaaaacaaaaataacctctcttcatccccttttatggacaatcaacttcaattctgcaccgttgaagaagcagtggaagaaatacggcagggacggatgatcatcgttacggacgaccctgggcgtgaaaatgaggcagacttgatcattgccgccgaattcgccacgccggaagccatcaacttcatggttacccacgccaggggcctcgtctgcgcacctctttcaccggaacgggcggacgccctccaactcccgctcatgacctccgtcaaccgggaaaacatgtccacagcgttcaccgtctccgtggatgcggcccatgacatcactacgggcatcagcgccgcggaacgctccctcaccattcgcacgctggcggaccccaaagccaccgtcaacgactttgttcagccgggtcacacattccctctccgcgccgttcccggcggagtgctgcgccgcgccggccatacggaagccaccattgacctcgtgcgcatggcaggcctccagcccgccggcgtctgctgtgaaatcatgaaggaagacgggaccatggcccgcatcggggacttgggaggattccagaaaaaacatggtctgaaagcctgcaccgtagcccagctcattgaataccgccgggccaaggaaaagcaaatccggctggtggaaaccgtcaacatgcccacagactacggtgactttacctgccgcctctatgaatcccagctggacggtgctctccacctggccctggttcacggggaaatctccccggacaaacccacgctggtgcgcgtgcatagtgaatgcctgacgggtgatgtcttcggctcccgccgctgcgactgcggcagccagttgcacaccgccatgcgccgcatcgcccaggaaggaggcgtcctgctctacctgcggcaggaaggccgaggcatcggcctggcggcgaaactcaaggcttacaaacttcaggaacagggtctggataccgtggaagccaacctcaagctcggctatccggacgacctgcgcgactatggcatcggcgcgcaaatcctgcatgacctgggagcaaaccagttgcgtctgcttaccaacaacccgcggaaaatcgtggggctggagggctttggcataaaaatcacggaacaggttcctctcatcatcccacccaacgaacaaaacagcaaatacctggctaccaaaaaatgcaagctgggccacatcctgtaactttccactccatcccttcatgtccacggaacttccccgccgccagcgcgccacgggcacgcgcgccaaaatctgcatcgtcgcctcggaatacaacgaacaatacacccaggccctggtagaaaactgctcggaagaactgaaaaccgtgcttccctcggtccgcctggaaatcatccgcgtaccgggagcctttgaaattccggtgtccattaaatccgttctctcccgctctccggaaaaacgtcctgatgccgtggtggctctgggggtcatcctgcgcggcagcacagaccacgcggacctgatcggctccaccattacccaggccctgatgcagctcgccctggaattcaccacccccgtcattcatgaagtcctgctgctgaatgatgaaaagcaggccttcgcccgctgtatcgcctctcagctcaaccgcggccgtgaagcggcccgcaccgctgcccgcatggcggaactcttcctcaactccctgctccggcaataatacctattactctctcttctctatcgccatgctctcacgcaaccaaatcagacaagccgccctccaatacctttacgccgcctcccagacgccggaaacggaacaggagggaatctgggatatcctgatggaacctttccggggagactactgcaaactcaaggccaaggccgtctccggccacctgacaagggactatccggacaagctgcgcctcttcatcacccgtgcgcgggaaacggcggacaaactgcagcaagaccctcttaccctgcccgtccgcgaccagattcaggacctgctgaccaaggaaggagaattcaacgccgccctgctccggctgaaaaaagccctgcacgaagaccccgccaatgacaagggttcgctttccgccgcctgcgacgccgcccaggaactcaataccgcgctgatgcagatgcgccgccgcctgctggacacgctcaaggacttcccagcctacaacgcaatctggccctccctcatttcctcctgcaggaaactccaggaaatcaatgaccgcatcaactgcctcatccacccggacgaccgcccctccctggcggaaataaaaaaagtggtggaggcaggacgggatgcggatgaactctaccgggaagccaaaaccctgggggaagacatcctgcgccgccgggacgggttggacgccgccatcgactccacgttggaaaactactccccggaacgcgtcagcgccattgaccgcgccatcctgcgcctgggcgcctatgaactccttcatcgcaaagacctcccggctcccatcgtcatctcggaggccatccgcctgtcggaacgcttctcctcagcggaatccccccgcttcgtcaacggcgtcctggccggaatctcaaaaacggaacacccggcataactccgcttcgcgccatggcaggattctttaaaaaactattcaccaaattctcccgaagctcccggatagactgggaagaactggaagctgagctggtagccgcggacatcggcatcaggcgcgccatgggtattgcggaccagctgaaggaaagcaaaggcctggatgcggaaaatctggtggaatccacccgtgaagtgctccgccgggcctttccttccaccgctccgtccctgcccgtccctccggaaggcaaaccgctggtcattctggtcgtgggcgtcaacggcaccgggaaaactacttctgcggtcaaattggcccatttgctgcaaaaacagggctcccgcgtccttctggctgcggcggacacttttcgcgcggccgccgtggaacagcttcaaagctgggcggacaagctgaatatccccatctgcaagggagcacccggccaggatccggcctccgtctgctatgaggcccatacgcaggccatcagggaaggcttccaatacctcatttgcgataccgcggggcgcctccatacgcgccacaacctcatggaggaactctccaaaattcgccggactctcgcaaagcaggatgcatccgccccccacagcaccctgctggtagtggatgccactacaggcgctaacgccctggcacaagccagggaatttcataaagcaacgcccctggactccgtcattatcaccaaaatggacggttccggaaagggaggcgtggccgtagccatcatggatgaaatgcacatttccccctcctttctgggaacgggggaagaagccgaagactttgaacccttcaaccgggaccgctacgtggattccctgctgtaacgggaccgcctcaaatccatgccaccgcttcccctcatcaccgcccagacggaggaaaagctgctcgccttcctgacggaacatgggcacaccaaattccgcacccagcaggttctggactgggtgtggcgcaagcgcgtcaccacctttgacgcgatgagcaacctcccccccgcgctcaaaaatctgctggcggaaaatttccgtttccacacgccggaaatcgtggaaatccacggctctgcggacaccacacggaaattcctcaccagaatggaagacggcagcctggtagaatccgtcatcattcctgccgcagcagcggaaaatggagaaaaatcggagcgcgtcaccctttgcgtttcttcccaggtaggctgtgccttcggctgcaaattctgcgcttccgggctgctgggccttaaacgccacctcaccacgggggaaatcatcgggcagattctctccgcggaagccatcgcgggaaaacgggtcaacaacatcgtcttcatgggcatgggggaacccctttccaattttgacaacgtggtggatgccctggaaatcatcacttcccaccgcggtttggaaataggggcgcgccacatcaccatctccacgtcgggattcgtgcccggcctgaaaaaactggcggcctatcccaggcaaatccgtctggccgtttccctgcacggagccacggacggagttcgcgaccaaatcatgccggtcaacaaaaaatggccgctctcccagctcattccggcccttgaagaatggagcaggggaagaaaccagatgcccacgctggaatacatcctcatccgggacatcaacgactctccgaaagacgcgtcccatctcgtccggctcgccaaacgcctgcacgccaaagtcaatctcatcccgtacaacaccgtggaggggcttccgtggaaacgcccttcggaagaacgctgccgttccttccgggatgcagttcacaaggcgcgcatccccgttaccatgcggtatgaaaaaggtcatgacatcaacgccgcctgcgggcagctgaggctgaggaaagaacaggaaaagaacggatggacgccccgttgacggaacggggcttttccgaatttgcaacgttgcctattgcccggctccctccgttgtgctatccttcccggccggatgccacccatccagccgcctcaccatggaaactacgacaaccaccactgccgttcccccgctggaactgaccagggccccccgcaaaaccccgtccctggacctcagggacattccgcaggctcccggcccggaaaaaggagtgctggccctcatggccatggacccggccacttacgtggggcagtgcgtgaccatcggcatgacggaggactacttctacctccccgcgcacaagctgctctggcgccttttccaggcccgatataacaaaaacgaacccattgacatcgtttccatcacccaggctttggaagacatgcaccagctggaagccgtaggcggaagcgcgggcctggcggaaatatacacctttaccaccaccggagcctattttgagcattacctcaatgtcctgaaggacaaattcatcctccgctccatcattgacatcgccaaccagtccaccacgcaggcctttgacaatccggacgacgtagcggaactgctggattctgtggaaacccatattttccagatacgggaacgctataacagcgccaaggatgaacaaagcctggccagcatccttaaacaggccgtcaccaattttgaaaaatttatcgcaagcaaaggccaaatccagggactgaccacgggatttgaggaactggacaaaaaaagcaacgggcttaaaccgggggacatgttcatcatcgccgcccgtccctccatgggtaaaacctccttcctgctcaacatcattgagcacatcgcgcttaacgaaaaaaagcctactctgctcttttcctgtgaaatgcccgcagtccagattgtggaacgccttcttttcgcccgttccggagtccgcagccgggaaatcatcaagagaggcaacctcacccagcttgaaatgaagcacttcaaacaggccgtcaaggaagtgggggcttcccagcttgtcattgacgataccgcagccatctccatcaacgaactccgggccaaagcgcgccgggtcatgcgggaccagggcggtttggcagccatcggcgtggactatctccagctcatgcgctcccactccaaacaggcggccaacagccgtgaacgagaagtggcggaaatatccgccggcctcaaagccctggccaaggaacttaaagtgcctgttatcgttctggcccagctcaaccgcggtccggaaagccgcacgggagccagcctgggcgtcccccgcatctccgaccttcgcgaatccggctccatcgaacaggacgcggacatgatcggcctgctctaccgctccgcctactatgcggaagatgaggaaaaacgccagcagatggccggacgggccaatctgcatctggctaaaaaccgcaacggccccacgggggacgttccgctccacttcgaagcggaactcatgcgcttctccacacgtgaggcggatgaacacgaccaggaaagcgaataaaacatctcgctgtctgtgcctgttctctgcggattaacaatccgttacaggctgaaaccgaagataattctgtttaattcgggcaaagttacaagtttctacgatcattgaaatgatacgttctttctacatgtaactatttccagaaaagggaattctcaaaattttattgcaaatttaaataccgcaaaggcctgttgaattttcattggagaccgatgatgccagtcgggcttgatttcatgaaaacgtcctctgatacgaaaggaaacgtctacacaagttattttctcttagaatcaaatcttgaccccggattgttaaaccggtagcatcgcggcagcgtcagcatttcttctgaccctattgatcaagttatttctgtttttaatatgaaaaaaaacttatttattgctacaatcctctgcggatcatgcatctgtgccaatgccgccagcatggtcacggaatggaccggcaatgccggccctacggaaggcaacacctatgaactgggcaatgcggacaactggagcaacggtgtacccgcccgcggcaacaaccaggggccggacgtcatcttcaataacaccggaaccatcaccctcagcggctccatggtggacacatccgatggcggcagcatcaccgtcacgggcaacagcaatgttacggttgggggaacccgctggacgggaaatgtcaccattggagcaggttccgctctttccctctcacaagtggactttaaaagcagtgacatcatcctggacggcaccttcaaccttggtgtctgcgggattgattccggcggcaacggcgcccgccttgtcttcggcattggaggcatcatgaacgtcaaccaaaaaatatggggagcttcggacttctccgtttccggtacgctggccaccacatccacggatctggctgctggagaattccagtttgttacccgcacgctgattacctccgccggctttgacggcggttccatttccctgggagacttcaccgctgaagacggcggagcgctgaccaaggcatccggcatcatggaagggaacgccgcagactatcagggccagtactatctctacacggaagacgggaacgtcaaagtgcagtacgtagtggcgggagccgttccggaacctgctacggccaccctcagcctgctggggctggcttccctgatgctgcgccgcaggcgcgcctgaccttccacaccctgtcttttttcctcaacagcctgtatgcccacgcatacaggctgttttattttcaggcgagtgacgaaaacgtcacaaaaaaacatgggacctacatacttgactaaccatccaacagatttcctctccctttctatcatctaaataatcattgatattattttgaatacttgatacatggaatattaatcttatttttatcaattttccctccgcaacaatttttcatccaaaatctaatagtcttttcccatttttcatttatatataatcgaatatatgacacaatctccttttcataaaaagatttgttcccaagatagtgtagaaacaaactcacttccccaacaatataaatccgaaccattaaaacacataaaggaagacgatgattcgatttataaattttatcaacaatcatatcttttgaagaatccacagtttgtggaatctttaagaaagagtccagaatatttagatcttgttgagtcagtagaaaattttttgactgaattaagaaatcacaaatctgagaaaaataaatagggctcccatcatctaatttaacattaagcctatcgcatatttctttacaataaaggttaatattttgatatgaatatttttcatcattcataatcgaaatatattgtttttaatataatttgtcaaatcaaatcaaatcaaaaaaccgctgactagaatatctagtcagcggtttccataatatgctgtctattaattcgttaatatgaatgaagctttaattcatccaagctttgaactcatagtaacaccaaaaacaacctatccaaaagataacggacatcaaccagatacctacatctttccatctcacgataccaagttcgcttcctccttctccaactgtaaggtatgttttacccaatgattgatatagtctatacaccgcccctattttgattaaccatccaaaaagtagataacaaataaatactccttttgaccatttaatgcttggtctattcttttccgcttccagtaaatcatcataagcggttctccctccttgataacttctggttgattgggttcttccgtcttgtccgcatatataaatggtatttccatctctgaccgttaccgaaacagaggtaaaaccaaggagttctccttttctggtatataaggttgaaccatccgtaccgatggcgcgaacatacaaaccgtcttgtaccgctgaactaatcatgattccgggtatttctctgagattccatattgatttttccctggttgactatccttggcgaatgccaccaacatgatgatgggacccgcaaaaggaataagactcattaacaggtaacttccactctgtccaatatcatggagacgacgaacgcagaccgccaaatggggaatcactaatccaatcgtcaaaataatagaaataacgatgaagaatatgccggccccggcagtggaatcgtctgtcaaaagtgaaagtcctatcaataaaggaacataaaggacgatgttcataaacaagtaaaacatccagaactcatggcgggtggcgcgtccagagaacgtggcgtacttcctgaggcatgtactaatcgcagacataacttattaatcataaatacctgaatgagatgatcatctcattcaggtatattgttttagtttccggaaacggtagttgtatacttgttatagatacccaagatactatagaccttggtatctaccgccgagacagtcttgatgcctccgttctttttggccgcttcaatggaggagtctcccagggcaaccaatccgcaataggatttagattcagattgaccagttctgatgccgccagcggatgtcgcatgtacaggcttgttaacgtccgaatagacgacgccgataggtcccattgttccgcaactgcacagaagtgttgcgcccagtattccaagtaataatgtcttcatagttcttatctcgttttgatgaatccccggaatgggaactcatccgcatcatacgagatagagtctgattgtaaacaacaaaatatcctaattcgggttatttctgaagataggttatcctcagaaaatgctcaggaagagggatagtctccaagaggaaaaactgcgttcattcctaagaatgaagcgtaagaaaatgggactgtctcaagtagaactttctgaattgtgtaatcttcctcagtcattcgtctccaaatatgagacaggagaacggtatttgacctttttggaggtgttatctctttgtaaattactcaatatcaaattagatgatcttgtgagggaattggagtcttgacttctgatagagttctctgagacgtgtagactctaaacaggggaaaggtatttgaccttcattggggttctaatggtctgtaaatcactcaaattagagtttttgaatttatttagaaaagttgagtcttgaccttttatagcaaaatgagttatgaaaagctcttatgaagtgctatgagaaaaattatcagtttcatttcaaagatttatctgaaataataaataacatactaaatgttctagatataaattttaaaaaaagaaattataaaaatctaaacggcaaaactatctataacctaataaacaatctgccagatgatgacattgtagatttttttgaatcgtatcttttaaatcattcatctcttgtttttccagatgctgaagaagaaaatctatatattcgtctacactttgctcagaattattttctaaaaaaggaaaaacgatatcctgattcaaacttttcaatttttgttgcagttgctttactatcatcagttttaactgatgtttggaaaaaagcagctcatcagtggatacttgaagatcttttacatctcccaagtaattttgaggatatttttttagatgtaaaagattatgtggtttacaataatgtttgcagaaaacatggagtatcccctttagatttttcattgttttaaatttcataaacttacttatcctcaatttttaaaaatcacctcactaaatcacaatacatcattctcttaccaatcatcttggtaatcgtatctcctatacattccatcacttcgaccttagaggtattatgtctataggaaaactcatggatgtacctcttaagatgttttttactcatgtaatggtaaactccatagtaacctctttttagtagagaccagaagctctcaatggaattagtatgaacctctccattgacatactgtttccccttatggttgacaaactcatggacaaatccgacaagtcccttgtaagacttgaactcatccgtaaacacattggaatttctctctacatgtcttccgatgaatccttgtaaattgtaagcggacgtatcgtcgatatgtttgacgatcacctttccattcctctgtttggccccgatcacaatcaatttacctactgaacctcttcccttgttcagcttcttggaaaaatgtttgttggattcctttcctccgatgaaggtttcatctacttccacaataccgtccaacttctcctttttatctttcatccaaacttcccgtattctgtgacaaagaaaccatgcactcttctgagtgattccaagttcttttgaaatctgaatagaggaaatgccttttctggaagtcgccaacagatacatacacatcaaccatttgtgaagaggtaatttggattcctctaaaattgtaccaaatctgacgctgaagaactttctacaatctttacagcgataaggcatcggtttttgatccttacattcggtgatataattggaaccacaatgaggacaacggacatgaccattccatctttttaactcaaaatacttccgggcagattcctcattaggaaatttggagaagaactcatataaggaagtatatttggttttgttgtttcccatatcgttgttgtgatatggaaattttgtcgtgttttgattggttcgtacgcgtttattttcagcgtattgagaattattttgtattacaattttcttacccatattgggcgagtagaaaattgttctcagaatttaatgatataaaaataaaagacatttaagttaatcgcatttaacttaaatgtctttaacattaaaatttttaccccaataacgaaaaagtatggtatactagaggaaatcgtaagagagaaaaccttaacagtgacaacatatattaaaaaattagacacggtagatctccacctaccatgtctgtaataattttatgaatacgcgagtatacataatgacgccctttggtccaagggcggtatatcatttacgacaagtaaatgtatactttatcaggttaactcctgatacgacgcctatccaagtatatcctatttgataacttggattgtcaaggcgaaggtaattcacagttaccttcgccttttttatttagtggatttcctgaaaaggaagaggtgatctgttggatggttagtcaagtatgtaggtcccaaaaacatcttcatgccattgccgggaatccgtagcatttttccattatctcccgttcgacgccatgcaaacccacgcaaaatcactcaacgaacgtttccgcacactcatctctctgattttcggtctggctatcggctgttccctgctcttcggggagtcccgctgggaaacgtctccgctcattgaagaaagcctcatgctcctggcctgcttcatggccggcataggcgccttcgggcgcatctggtgttccctctacattgcgggctataaaaacaacgtcctggttactgacgggccatactccatgtgccgcaacccgctctatttcttcagcttcgttggcagcataggagtatcctgcgctacggagaccttcaccatccccctgcttacggcgctggcgttcggaatctactacccgtccgtcatcagaaaggaacaggaaagactcaccgcccttttcggagacgcctaccggaactattgcaggaacgttccctccttcattccctccctctcacggcttaaaccgccgcctgccgcctactccgtcaatcccgccacattcacgcacaacattgtggatgcgctgtggttcatctggttcatcggcatctttgaattcatcagcggacttcatgaagccggaatgcttcccgtgtggttcctcattccgtaacaggctcttttctcctggcatccagaagccccgcaagcgcccgttgggaaaccatcttacggaaagatgcgcggtcccgcggataaagcatcatctccgtccgcgtcttccccccccggaaagcccaggcaagccatacggtccccacaggcttttccggcgtaccgcccccggggcccgcgatgccgctgacggcgacagcgacatcggctccggagcgttccagggctccttccgccatcgctttaaccacgggctcgctcacagccccgcaacgcttcaggacctcctccggcacgcccagcatctccgtctttgcccggtcggcataagtaacccacccgcattcaaaaaccccggaggcccccggcacatccgtaatcctcttggcaatcaggccgccggtgcagctctccgccgtcgccgccttcagaccctgctgcgccagatggcacacaaccgctttctccagggatgcccccacaggagccagcacatacgccccggccagaatgcgcaaacgggcctctccctgtttcaaagccacctcactgcccaccaggcgcacgtccacttccccgacgcgcgcgcaatacgccacctccagaccctccacctggtgcagggaatcatccaccagctcttggagatcgctctcccctatccctaccaggcggaacacgcgcaaatgagaaatatcctcatccgccaaatcttccagaagcggcatcacggaatgttccaccatcggcttcaactccgccggcggccccggcaacaggatgaacatgggaagggaaccgctggcaggcatcaccagtccgggcgccgtcccgttggaattctccagcaccgcggcgccatccggaaccatggcctgcttgaaattacactccgcaatgggaatccccctccgtttaaaataactcttcagccactccgccacatgctcgtcacggtgcatgtccacgccgcaaacgtcgcacagggcttcccgggtcacatcatcgctcgtcggccccagtcccccgcttacaatcacgatatctgcgcgccgggcgctctccctcatggcctcgttaatagcgtacccgtcaggcactacggttaccctccccacgcggaaccctgcctcaaataatctgttgcccagccatgcggcatttgtattcacaatactccccagcaaaatttccgtcccggtgttgatcaattcaaccctgatctgtttcatgcagccagtatgctccctcaagcgctccgtgacatgcaacaatcctgccatgtatcataaaaaacttcatttaaacgccccgtaagatacattaggggcactgacaaagaccatgaacacaccttcccggccccgggccaccaaaatcatctgtactattggaccagcaacagacacttccgacatgctgggccagcttattgaagccggagccaacgtcttccggctcaacatgagccattccaaacacgactgggtccgggaagtcgtcttccgcatccgccggaaagcagcggaactgaaagcgaacgtagctatcctctttgacctccaggggccttccattcgcacgggagatctgatggaaccctaccatttgaaaaagggagacaccgtggaaatccgcctgggcacagccaagccggaacttcctttttccaccacggtaaactatgacggcctcctgcaggatgttcaggcgggccataccatggtggtggataacggaggcatcctcatgcgcattgcggaagtgcgcccggacaggctcatctgcgacgtgctcacggaaggcgtattcggctcccgccgccacatcaaccttcccggcgtagcgctgcggctcccggccctgacggaaaaagacttggcggacctggccgtggccgtagaatgcgagacggactacgtagccatgtccttcgtccgggatgccgcccatattgcccagctccgggaacacatcgacaacttgggaggcaaggcccagatcgtcgcaaaaattgaagaccagcaggctgtccgccacattgacgatatcatcctggccgcagacgttatcatggtcgcgcgcggagacctgggcattgaagtcagcattgaagaactgcccatcatccagcgccgcatcgtccgccattgccacaggctgggacgccgctgcatcgtggcaacgcatatgctggaatccatgataacccagcccacccctacccgtgcggaagtcacggacgtttccaacgccatctttgaacaagtggatgccgtcatgctttccggagaaacctccgtgggccattaccccgtacgctgtgtggaagtgctggattccatcgcccaccgcatggagtgctccggcaatctcaacttcgcggcatccgccatcctgaacggagaccgccagaaagccaccaaggcagccatctccctggcggactccgtggaaaacgcctgtctgatcgtctttacccgccgcggcctggccgccacgcaggcagccgtcctcaggccggaacgggctgccattttcgccttcagcaatgaccctgtcgttgtcaggcaactcgccctggcgcgtgacgtaaccgcctttgaatcacccttcctgaaagatccggcccgcatgatctccaccgccctggacctgctgaaagaaaaagggctgatctcctccggccagcctgtcgtcatccagggggacagcctgcaaggggaactgctggcggactccatcatcttcatgcgcgtggaataatggcctgcacctttcctatagagcgggagatggccgtgtggcccccgcccgcccccctcagggaacttctgctggatgcggatccggacgaacgccggatagcggatcatctggcccacggcgaactttacgtcgcaaaaaactgcgggactgccgccggagtcattgttatccgtcagacgagggaacatacatgggaaatcatgaattgctccgtagctcctgaatatagaaggcagcattgcggaacagccctagtgcggcacgccctggacatcatcagaaacaaagggggccggtatgcggaagtgggaacgtccgatgcatctccggggccaatggctctctatgaaagctgcggattccagatttctggcgttatcaacaaccacttcacggacaactatccggaacccgtctgggacaatggcgtgcaatgcattgacatgatccgcatgcgtgcggacctctcccttcggaaaaaaggagcgcatcatgctgctcaaaaagcataaaccacgctgactcccgtcacccagctattgccctttaccagcgttcttccatacacgcggttcaccccgtgggaacccttgccgagccagtgcaggccaacgaaaggctctataaaaacattcccgaacagacggtaattcgccgtcaccctgaaatagagagactgccagccattgctgctggaaggccaataggaagaactcaacacggcgccgaatttaaaccccatataaaggttttccgtcatccggaaatccgatcccgtacacatgtcaaaccaccagcccgtgattccgtaaaaggaatatgcggcacttccctgcgcataaaaaccgggaaggaatcccacatcatggcgcatgatcagtgccgcttcatacgttgttcccccattgccgaacaaacgttcggaagcaaaccccgccaatccgccgtcattcgcacgaaaggataatgccgcatacgtagcttttccgaacttccgctgaagaccaagatccaccatcgtctcattctctatatcaactgccggatgccccagaaagatctcctccttcagagccagaatcagggaataccggtcattcaaatcgcttctccaatccagccgcaaaggagccgtaggattacagcccgcgggaatcagccccctgaactcgtaattagtggaatacccggctttgatactgccgctgaccggtcttaaagcaggagcggaaggaacctccggaatgcgtgattccgccgaagaaacggccatggaagcgacagagacgatgcccgctccaaagagaaaagaaaaaaagaaattcataacatcgaaatgccgtgcggaaagtattctggataaaaaaactcctcttggcaacaagcaaaaacgccgctgttttctgctctgcttcaggaaacatcattcaggcctgcctgctgccaacttcagaaagaataaacgagaccagccccggccactactccgaaattcttataaggcttgtcgcccctgtccgaacctcggttggccttcaaggcgccctctccggcccagttgaagctgacgaagggaacgagagacaggttcttggcacccagtttcaccggaagttcagccttcagccaccaggcctgggaaccgttggacataaaaagggatttattgtcaaaataagaggaagtggcagacatcccggcgctcaatacaaaatcgatgtcggagcagatagctgcctgataccccacatgcggccggaaccaccagccggtcatgccctggaaggcatagctcatggttacgccggcaaaccagtttccgggcaaaccgtaatccagcgtcagataaaattcctgaatgacggaatgggtattccttatatacacatcttcatcactcatccaggtggcgttataatcatacctggcaaaattcccaagcaggccgccgtgaatcaggttccagccaagcgtcgtggacaggttcttcagtaaaccatcccggttcttccatccaaaaagaaaatcggtctcgttatgaaaagagaaatctctttcccctgccatgtggtgtcctgaaatcaggaacgtacaagatgccgccccaacaacggaattacaatcatccaatttataattcaaatccacactggcaggaataattccatctccttccgtcagtgaatgagaagccacaatgccgcggcaggtgtaattggaagcatacccggcatcaacttccccggacaaaggacagtcctgttccacgggaacagaaaccggagaaacagttttaacggaaatttccgcaaaagcggaagcggcaaaaaaaacggcactccccgcaataccaatgatatttctgaattgcatcatcacgcttcaaatgaaaatctggatatcggcgcattgcaaaaaacggagttcataaaaaacgatacaccgccagcaattaaaaaaagcgcggcggatttctccgccgcacctgaaaatataattcaatcgcaggccggatggcttagaaagaatagacaaggctggctccagccactacgccgaagttcttgtaaggcttgtctcccttatccaggcccttattgaccttcaacgcgccgcagccggcccagttgaagctgacgaagggaacaagggacaggttcttcactcccagcttcaccggaagttcagctttcacccaccaggcctgagcgccattggcctgctcgaacgcagcgccaaaatagctggacgtggcagacatcccggccgtcacgacaatgtccgtgacggggcagagggcggccttgtagccaacataaggttggaaccaccagccggtcatgccctggaaggcatagctcgtggttacgccggcaaaccagttctgagtcagatcgtaattcagattcaggtaaaattcctgcgtgacggaatgagcatggtcatacttggcaaagttgcccagcaaaccgccgtgaatcaggttccagccaagcgtcgtggacaggttcttcagcaaaccgtccttattctgccagccaaggttgaaattggtctcattgtggaaggaaatatccctgtcccccatgagatggtggcctgaagtcaaggtcgtataagaagcggaagccacaatggagttggcatcgcacagcttgtaattcagattgacaccggcggggatgacgctatccccttccgccaacgcgtgggaagccacaatgccgcggcaggtgtaattggaagcgtagccggcgtaaatatcgccggacagcgggctggaagtcgccacaggagcgggaaccggagtcggagcaacaatcttgacgggagtacccgcaagagcagctccggcaaaggatgccacaactgccgcaacactgatgatgttcttggtttgcatgactattacttggttagggtattaattgttgatttgctaacatggaaagaaaaatgctttttccccccttgttaagaaaagtgaaacattttcgtcacaaaagtaaagaattttctcttgataaatcaacaagtcattgatttcacattatttacatccaccagccccatgacaaaaaatccaattctccatatcttgccaaaccttcccttccaaggccttgctggatacagacactccgcaccatccagaagcctgtcttctttcagggcaggagaaggattcaccaaaaccttccgcctgcaggaaagcagcatgggcaaatccgcggcactgtcgctgtaggcaacggcgttttccagaacaccatgttccggcagtacattccgctcccgcagacgttccaccttcaccgcccccttattattaccgttcggcagtttcggcattgccggcatgcgttcctccagaagcacatccgttcccagaacttcgtcaaatcccagcagttcacccagaggcttcacgtaaaatgatggagaagcggaaaccatgagacacaaataccccttcttccgatactctgccagccgctccttcagctccggataaatccattcctgcgccatctcggcaaacttccgtccatattcccgcaccgtttcagcgggaagcccccacaaatacatgagataagccctcttcatccggttctcatcccatattctcaaaatatagagcgggatacaggccaggaaaagaaaaatcagcaagcgtctccaaggatggcgcctcaccacaaaacaggaaaaaacatattgcgtatcccagggaaggagcgtgccgtccatatcgaaaagcgctgcgcctctttttttccaatcgtccgtcatgctttcatcctatatccgtttcccttaactctcaacacccaactcttccattactcccccctgaatgcccaaaaccccggccgccgaaaagcaaccggggttttgaagcaaatccagaaggaaataaagattaacgggagtagaattccacgatgagctgctcgttgacgatgggagcaatctcttccttggaaggcacgcgggcaatcttgcccgtgagcttgtcacggtcacattccagccaatccggaaccacagtagcctgagtcaggtcaagggaacgggtaaccagctgctgggaggaagccttgccgccaacggcaatgacatcgcccggacggcaggagtaggacgcaatgttcgtctttttgccgttcacggtgatgtggccgtgggaaacgagctgacgggctccggcgcgggtgttgctgaaaccgaggcggtacacaacattgtccagacgaagctcaaggagctgaagcagaatatcgccggtaatgccgcggcggcgggcggcttctgcataatacttgcggaactggccttcaagcacaccgtactggaaacgcagcttctgtttttcagcaagcatcacgccatagtcggatttcttcttgcggccggcgcgcatgccatgctggccgggagggaaggggcgcttttcaagagccttggtggaaccgaaaagggcaacgccaaaacggcgggacactttatcgcggggaccggtataacgagccatgatatattagatctataggtaaaggattctcaattagacacggcgggccttcggaggacggcagccgttgtggggaatgggagtcacgtccttgatggaggtgatttcaataccgatcgtctgcacggcacgtacagcggattcacgaccggaaccggggcccttcacacgtacttccacttcacgcaagccgtggcccatggcctggcggcaggcgtcctggcacaccacctgcccggcataagccgtgctcttgcgggaacccttaaagcccatcttaccggcggaggaccagccgatgacattgccgcgctggtcggtcacagtcacgacggtgttgttgaacgtggaggaaacgtgaaccacgcccgtggaaacgtttttgctgcccttggccttcaggattttaggcttgtcgtcatcgccgcccagaccaagttccgcaaagatgtccttgcggggttcgggcttcttgatttcttcaggagcggaaacagcggcggccggagtttcagcgacgggagcgggagttgccgcttccacaggctgttcggcggtttcgttggtgatttcttcgctagccatagtaaagctatattaaaattcagattggcggattacttcttcttggcctgcgcgccaacagtcttcttcttgcctttacgggtgcgggcattcgtacgggtacgctggccgcgtaccggaaggccgcggcggtggcgctgaccacgatagcagttaatggaggtcagacgcttgagaatggattgcttttcacgacgaaggtcaccttcaatcaaaatgccgtcagtggtgattacttgaacaatcttcgtgagctgttcgtcggtaagctgtcccgtgcggatgtcgggattgatgcctgcttgttccaggattctcttagaagtcgagcgaccaattccgtaaatatacggaagggaagcctcgatgcgcttctcgttgggtatttctgtaccgaaaaggcgtgccataatggattggatttgctagctgttatttttctctgcctcgcgcagagctattgcttggggcaagatggataccataaattgaggttttgacaagaccaaaacatcattttttctatttttaatctcttgcaccgcttgaagatgcatgccgcccgtagcggcggaggatgcgctccacagcccaggaagcgtgttcctccaccagaggagactccccgtaaagcgccttcagaaaatcaatgtcatctggagtccccgcattccccagcacaacgcagccgttacgcagcagcccttccctcttgagccttttcaacggggaattccggaacagggccgcaaaaccgccggcatccagggaaagaagaccgcgcaggggaatggaagccagcagacgggacatgcggaaccgttcgtcaacatccggcaaaggcttaccgttccagggacagaccatcacgcaggtatcgcacccgtacaggcgcgtgcctatcaggggacggatttcttccggaatagccccccggtgttcaatcgtccagtaggaaaggcagcgtccggcatcaacctgaccgtttcccataattgcgcccgtcggacacagggccgcacaacggcggcaactgccgcatccgtttgaaaccggagcgtccggttccagttccagcgtagtcagcagggtagcgataaaaaagcgggagccccctttcctgcgcacgatcagaccgcttttcccgcgccagcccaggccgcaggcctccgcatggtcccgttccataacggggccggagtccacataccccttctgcttcccgccgtaaatggaaagcagctcctgcaaatccgccagtttttcctccagaattccgtggtaatcctttccatgggcgtaaaggcaaatgcttccctccctctccggacgcctaccggggctgtcataatcataggacaggcagatgacggaacggcatccgggaagcacttccgcaggatccgtgcgccgctccggggaacgcgccatccactccatcccggcgtgccatccgcgctccagccattgaaacaatttttccgcatgcgggcttttttccgcacgggccacccggcagccggaaaaaccaagctgccgggacacggcgcacaaggaatctttaataacagaggaatccggagtcagcacgccggaatcatgaacaagagcgtgcctcccaccaagaattttcttctgtccggtggaaattggattgcctgcaccccgccgccgcttcataatgccgcatatatgaacatccggattctgagcgatgggaaacagggccacctcaaccagtccctggggctggcgcaagctctgatctccaaagcggggggaactgtggaaacggtgaacctgcaggggctttcccttttggggaaaatccggaaggtcgtctcaggcagcgacattccacggccggatctgttcatttccgctggacatgcaacgcatatcccgctcatctgcgcgcggcaccatttcaaaacccgggccatcctctgcatgaagcccacgcttccctgctcctttttcgacctctgccttattccccgccatgacctggattccggccgcgattacacggatacgaatatcttccccacccagggagctctccaccccatgagaccggatacctccgtaccaaaggataccacactgattctcataggaggacccagcaaagattttgactgggatgacgaaagcatgctcaaccagctcgcgttcatcagcatccacacccccggacacctcgttctgaccacctcgcgccggacgccggacggctttgcggaaaaaatccggacggccgttccggaactaaccgttgttcccgtggaggaaacccggccggggtgggtagcccggcatctggcgcacgcctccgccgcctgggtcagccaggacagcgtctccatggtatatgaggctcttggctccggcgctcctgtaggcatcctttccgtaccgcgccgacatggcagccgcaaatcccgcatcctgtccggcctggagacactggaaaaggaaggcatggttactggatacagtgactggaaaaaacagaacttccgcctgacggctcccggttccccgcttctggaagcggaccgtgcagcagactacatcctctccagatttttccctcagctccgcgccttatgaaaatagtacatctcgtcccctccatggaatccggaggcgtggaacaagtcgttatggaactgggcagcggcctttcttcccggggcgtggaaaatatcgtcgtttccggaggcggacgcctggtgccccgtctggaaaaggaaggctcccgccacatcctgatgccgataggcaaaaaaagcatctccactctcttccgcatcggggccctccgcgccctgcttcaggccgtcaggccggatatcctgcatctccattcccgcgttcctgcgtgggcaggctacctggcatggaaaaagctcccgccggaagaccgtcccggcctcgtcaccagcgttcacggcttctactccgtcaaccggtactccgccatcatgagccggggagagagggtgatcgccgtctccaactgcatcagggactacatccttgaccattatccgtccacccctccggaccatatcagaatcatacccaatgctatttccccggaccaatatcacccggcctactccccctcccgggaatggctcacgggctggttcatgtcctatcctgaactgaaggggaaattcaccctgtgcctgccgggccgcatcacgcgcctgaaagggcatctggatctgattccggtcgtcaggcagcttctggaacaggggattccggcccacgccgtcattgtaggagaagcaaagaagggaaaagaagaatataaaaacgaggtcctgcgggcaatagaacgttccggcgtctcccagtccttcacctggacaggacatcgccaggatctgagggaaatcctttccacatgttccgtcaccctctccctgaccaaaagcccggaagccttcggcaaatcaaccctggaggcgctcgccctgggcaaacccgtggccggatacgcccacggcggagtcaaggaacagctggacgccttccttcctgaagggaacgtcgccgtaggagataccgccgccatggcggacctgctggcccgctggcatgcccagcccccccccctgccccggcaaattccttccccttacaatatgcaggatatgattcaagcccatctggacgtttaccaggaactgaccccttattcatgacaccccgggaagcagccatagccctgaacctgataccgggcctgggccctgtcagaatcatgcgtctcctgcaggtattcgcctctccggaactgattctggaatccccttcctccctgttgatggaaattcccggcgtgggggcgcagctggcttgccgcatttcctcttggcggagcaccgtcaacccgtacagggaactggaactggcggataacgcgggggccgcggtaaccacggtttttgacgactcctacccatcctccctgcgtgctctcccagacccgcccattgtcctctactcctggggaaactggaccggaacggatgccgaacgctccattgccgtcgtcggctcacggatggccacccattacggcaggctttgcgccagaaacatctcccatgacctggcggaagccggagtcaccgtcatttccggactggcgcgcggcgtggacacggaagcccataccggggccatggacgcggaggggcgcaccatcgccgttatcggagcaggactcaacaaactgtatcctcgggaaaacagaaatttggcgcagcgcattgcggacgggcatggagcggtagtctccgagttcccgatggacttgcccccttcccgcaccacttttcccatgcgcaaccgcatcgtgagcggctggagccgcgctacgctggtggtggaggcgtccggacgcagcggagccttgatcacggcccgaacggcggccgaacagggccgagacgttttttgcattcccggaccggttgaccggcattcttccgacggatgccatgccctcatccgggacggagccatcctggctaccggagcctccgatattctgcaggacatgaactgggccgttccggaacagggactgcctctcttctcgccatgtcccccttccggagcctcacccccaccgcttcccactttggaagaaaaggagattctccacgccatcagaatgggtttcaatactattgacaccctctgcacctctctgggaaaagcggcgcataccatcaccccgcttttggccaaaatgcaaattgcagggcaaattactccggacgctggagggtatttctccattaacagcagggaactttaggaagattccgcttttccgccggggaaaacgccaggtccgggcctcctctccctgaccatggaaccggaagggagcgccgtccatctcccgtataaaaacctttccatccggatgcaaaaaaacgtcttaaaacagtcgccaaatcctctccttcaataattttattccaaaaattaaatatatcgtcaggacatccccggcattttaaatgtctgcggcaaaatttacatgcccgcgaaaaacaaaatatgttcggaaaaaatctctgctatatttacgggacacaggctcgggcgcatacggcaacacctcttaaaaagaactgttgacgaacatattttgaacgcatctctcctgcctagagtctcatccttcacaagatctgtccgacggatggaaaaagcaattcaaaatccgttcagggtggtttttggttccataggtagttaatagagaaaaaaggccgcggattatccgatccgcggcctttttcgtccggctctctttcaaatgcggagtttgggcttgatgaacgaaacttcttactgtagcaacaagacatgcgtttattcgcccttcttgcaggattctccctttgcctgagctccacaagctgccaatcgtacggggattcaagtgactacatccccctcgcaacgcccgttcccccacaactctcccagccggtttcccatgccctcccccgaccggccaatttccccacacgccctgtagccatcccctcaagcgccccgcgcacgccccgctgcgccagcgcctgcgtcatggacgcccttaccggcaaagtgctcttttcccacaacggcctccagcaccgccaggtagccagcacgcagaaactcgtgacagccatggtcgtgatggaacacggcagcctggacaaaaaagtggtcatccagccttccgataccaaggcggaccccaccaaactgggattccgggcgggggaagtctattcacgccgcgaactgctcaatgccatgatgatccgcagtttcaacgacgtagccctggcgctggcccgcgatacggcgggttccgttccccgtttcgcccagttgatgaatgccaaagcccggcagatgggcatgtacaactcacgcttcgccaatcccaacggcctcccggcggatcaatattccactgccattgacatggcccgctgcgcctattacgtgtaccgcaacccggaactgcgcaatattatctgcaaacgccaatatgcctttacccgcgccaacggcagaacgcttctgttgagaaacaccaacaagctgctcacccagaacccctgggttaccgggatgaaaaccggatacacgaacgccgccggacgctgcctggtttcctcagccggcgtcaacggacgccatatcatcgtcgtcgtcctcggctgccatccgtcccgtatctggacggaatcggaaaacctgatcagatgggctctgggatacgccgtataaatgcccgtcggcaattggtatttgactttcacggcgtgacccgctatcagtcctgcctatgttacaggcaggtattgtaggtctccccaacgtcggcaaatccactctattcaatgcggtcacccggacgcgcaaggcccaggcggccaactatcccttctgcaccattgatccgaacgtgggtatggtaacagtcccggatccccgcctgcaggttctttccgacatgtccggttctgaaaaaatcatccccacgcttattgaattcgtggatattgccggtctggtcaagggagcctcggaaggagccggcctgggcaaccagtttctggcgaacatccgtgaagtggacgccatcgtgcaggtagtccgctgctttgacaatgatgatattatccatgaactcggttccgtggatcctctgcgcgacattgacatcatcaactcggaactcattctggcggatatcgccaccatggaaaagagactctcttcccgcgaacgcaaggcacgcagcggcgacaaggaagccaaggccgaagtggccctcatcaccaaactcctgccccacctgaacgaaggcaatcccgccctcacccttgaaccgcagctggacgacgacgaacgcaagctgctccattccttccagctgctttcggataaaaaaagcattttcgcctgcaatgtcaatgaagacgaactggcggacgccatctccaacccggacgcccatccctacgtctcccaggtgaaaaaatacgtagcggaacaccataacgcggaagccattgtcatctccgcccggattgaagaggaactcatcgacgtctcggaggaagaatcccgcgaattcctggaatccctgggtgtgaaggattccggcgtttccgaccttatccgcgccgtgtaccaccttctgggcctgcgcacctacctcaccacgggaatcaaggaaacgcgggcctggaccattccgtccggggcaaaagcacctcaggcggccggcgttatccacacggactttgaacgcggttttatcgccgcagaggtagtgcactacgacgacctggtttcctgtggcggcaaggccggagcgagggaacacggcaagctgcgcatcgaaggaaaagaatatgtcgtcaaagacggggacgttatcgaattccgcttcaatgtctagacggaagcgttaccggaattccattgacttttactgatataaggggcagattgctcacaaccttcacatcgcctcatgactgatacagacgtcaaatccacccccctggcagctaaacacgttgaactgggagccagaatggttccttttgccggctggaatatgccggtgcagtacaccggcattctggacgaacacaaagcagtgcgcgaaacctgcggcatctttgacatctcccacatggggcagttcacggtagccggcgattccgccgcggcctggctgaactccatgctgaccaatgacatcaacaaattgaatgtagggcaggggcaatactccgtcatgctcaatgacagagccggagtcattgacgaccttatcctgtaccggatggaaccggaaaccttcttcgtagtggtgaacgcctccaagattgatgaagacttcgcatggctttccgcccatcaacctgcaggcgtaaccctggaaaacaactccgacgaatacgtggggctggctgttcaaggtcccgaatgcggagaagtattctcccgcgtcatccccggtgtggaacttcccccccgcaatggaatttcccgcatctcggcggaagggacggatctcattgtctgccgcaccggctataccggggaagatggttttgaattcttctgcccggctaaggaaggcgtcaaatggtttgaagcctttcttggagcaggagccaaaccctgcggcctgggcgcccgcgacagtctgcgtctggaaatgtgctatcctctgaacggctccgacctctctccggacaagacgcctctggaagccgggctcggcttcttctgcgcgctggatacggatttcatcggttccgatatcctccgggaacaaaaagccaacggtctcagccagcggctggcggctattgaatacaccggcaagggagcccctccccgcgcccattatgccgttcacgtccccggcggagaagccatcggagaacttaccagcggcgtgctctctccttcgctgatgaagggtattgccctggcctacctgcctgccgcccatgccaaggtcggcacggagctggaaattgacgtaaggggaaggaaatttccggccgtggtcgtaaaaaaacccttttataaaaaaggctgacacgacggcgcaaaaataaactgacaaacacctcattttactacactctcacttcaaacaattacatcttatgcacgacgtaccagaaaatctgctgtattccaaggatcacgaatggattgaaattgacggggacatcggcaccatcggcatttcagaccatgcccaggccgaactctccgatgtcgtctttgtagaccttcccgaagtaggcgccaccgtcgcggccggcgaccccgtcgccgtcgtggaatctgtcaaagccgccagcgacgtgtacacccccgtttcaggagaaatcctggaagtgaatgaagagctttccaatgacccctccctcattaactccgacccctacggcgcaggctggctgtacaaaatccgcctggacgttcccacggaaacggaagatatgatgaacgccacggattacgaggaatactgctcctgaaccattctttcctcccccgccccggtgattccatcccggggcattttgtttggcccgtcccgcggccggacgctattaccagccagagataccacatgaatacccactcagattttgccagccggcacatcggcccccagggggaagaacgccgggaaatgcttgacagcctcggctaccggacgcttgacgaactcattgcggacatcgtccccgcagatatccgcatgaaggccccgctggacctgcccgcagccaaatcggaaacggaagccctggaggaactccgttccattctgcggaaaaacaagctcctgaaaaccttcattggccagggctattacggcaccatcactccctccgtcatcctccgcaatgtactggagaaccccggctggtacacggcctacaccccttatcaaccggaaatcgcccagggacggctggaaatgctcatgaatttccagaccatggtctcttccctgacagggctgccggtagcgaacgcctccctgctggatgaaggcaccgcagcagcagaagccgtcaccatgtgccggaacgcgcgccccaaagcaaacaccttctttgtggcggacacctgccatccccagaccatcagcgtcatccgtacccgcgccgccttccagggcgttaacatcatcgtgggagattgctcatcctttgaccccgcatccatcggtgcggatctggccggagtgcttgtccaatatccggacacgctcggccgcatctgcgactacacggacttcttttcccgcgtgcatgccacgggcgcgctctgcgtcgtggcggcggatctcatggcccttaccgtcatccgggaacccggcgccttcggagccgatatctgcatcggcaacacgcagcgcttcggcatcccaatgggcttcggcggcccccatgccgcctacatgtcctgcacggatgctctcaaacgccgcatgcccggccgccttatcggcatgtccatagataccctgggccgcccggcctaccgcctggccctgcaaacgagggaacagcatattcgccgcgacaaggcgacctccaacatctgcaccgcccaggtgctcctggccgtgcttgccgccttttacgccgtataccacggacaggaaggcctcaaacgcatcggcacggaaatccacttgaaaaccaaaagcctgtacaaggcgctcacggaagccggcatcgccattgaaaacaaaaacttctttgacaccctgctgctgtccgttcccggacaagcggacgccatggtgcaaaaagccctggaagccgggtacaacatccgcagggtggatgccgaccacgcagccatctctctggatgaaaccgcaacctgtgcggatatagcggcactggcctccgcccttgcaggtgcggaaacatccgctgcctgcgattgcgacgctcttgcctgggatcccgtccacacgcgccagacgcctttctgcacggaaaaggctttcaactcctaccattccgaaacggaaatgatgcgctacatccgccgcctggaatcccgggacctggctctaaatgaagccatgatccctctgggctcctgcacgatgaagctgaacgccgcctctgaaatgattcccatcacgtggccggaagccaactccctgcatccctttgttccggcggaccagtcggaaggcatccgggaaatgctctccgtcctgtccgaccgtctggcgaaaatcaccggctttgccgccgtatccctccagcccaacgccggcgccgcaggggaatatgccggactgttggccatccgccgctaccagaagcacgccggagaaggccaccgcaatgtctgcctcattcccacctccgcccacggaacaaatcccgcatcctccgccatggccggcctcaaggtggtgcccgtcaaatgcgacgaaagaggcaacatcgacatggcagacctgaaatcccaggcggaagcccataaggacaatctctcctgcatcatggtcacgtacccctccacgcacggggtatatgaacagacaatcaaggaactctgcgacatcgtccatgccaatggcggccaggtgtacatggacggcgccaacatgaatgcccaggtaggtctgacttgccccggctgcattggcgcggacgtctgccacctgaacctgcataaaacctttgccatgccgcacggcggcggcggtcccggcatcgggcccatcggcgtagcggaacacctcgtacccttcctgcccgggcacctcacgctgggccatgaagaaggggccgtagcgtctgcggcgtggggaagcgcctccatcgccgccatctgctggatgtacctctccatgatggggccggacggcctcagggaagccacggaaatggccatccttaacgccaactacattgccaagaaactcggacatctcttcccggttctctactccggcaacaaggggctggtggcgcatgaatgcattctggatccgcgtcagctcactcatgacgccggcctcacggtggatgacattgccaaaaggctcatggactacggcttccacggccccaccatgtccttccccgttccgggcaccctgatggtggagccgacggaatcggaacccaaaaaagaactggaccgcttcattgaagccatggaacgcattcatgcggaaatcacggccattatcaacggtacggcagacaaggaagacaacgtcctgaaaaactcgccccataccgcagaaatggtctccgccgacgaatggcggcacccctactcccgcagtgaagcggcttatccggtctccggtctccttattcacaaattctggccgtatgtaggccgggtggataatgtgtacggagaccgcaatctggtctgcacctgcgacacggtggaggaattctccaaggccgtagagttataaaaatctcatccttcctttcaaaaaggctgttccattcatttggagcagcctttttcttatgttcaagaatcggatttccaatccgaaagagcaaacatatccagaaaacaattaagcccaaaagcaatatgggttgaaaaagaaaaaaggaacatttctcccaccccgcttttcctcccctttcattttgatgacccatttgttctcaaaatagagtgttgacttcggattggaaatccgttgagctacgtctcagatgagctttttctctgcccttactgttcctggccttcaacagcatctttctttttccagggaagattccgctatcctcaaagggtatggaattctcttcatgatctttcatcatgtcttcggcttatacgctctacccgcaggtgtggatacggcatggattgctccccagcttaccaaagccgctcccatctttaaaatttgcgtgcccatttttattttcatcacggggtacgctatgggatggaaaacaaattcatccccaaccttcggttccctcattaaaacaggcttttcccattactttaaattctggaaaatttatttcttatgcctccttctggctattctggtttcctgggcattccccttgcccattttgccatccgttgccgacatgggttggaaaaatggcctgcttgtcgtaacaggattgaggccctgttatcccgactggtggtacatggctcttttcgcggcagccaccatggccctttatccaatctgtgcgtggatcacgcatcacattgcgcctgtcccgtccatggcagctctgctgggagtgtcccttttatttcaaagtacggcccacattcccagcctgccgggaatcgcctattccttccctcctttcctgccctgcttcattctcggctacatgtgcgcctttctggcttcacgcctctctgctctttcaatttcccaaagcttgggagcaatcctgttgctggctcttgaaatactatccatccatctcttcagtttttcaaaagccaaaaccctgacggttatctttctcttcaccctctggtgtctgccttggataacccggaaactccgcctcacaccgctcttgacgctgctgggaacttattccgcacttatgtggctgaatcacagattcattttcggctaccacttcagctgggacctctatggaacccaaagcatcagcgtagtattcatcgtgacgctggtctcctcccttctgctggccatggccatgcaaaaactttttaaccggatgattccctcaaatccgcaaacgcagtcaaaaactttgtagcaactttacaaggtccggattccaacacctcttaattccaagggggatctccgtacttattttctccaatccggctttccccatgggataaataccacaacagcagccaccctatgaagggaacggccagaaaaaccaggaaaaagccgctcctcccgacatcatgcagacgccggaccatggtagccgccagcggaatagacagcacggcgagcaccacgtacagcagaggggaaaccagctcaacccacggaaccagggacgggaaaaaaccgcattccgcaaaagaggggactcccgccacggccagccacgcaacccccactctggaaaaaacctcgtgcagctcccctttcccggcacggccctcaaaacggcaccatgccttgatgacgcgtatccagtacttcttcctgctccagccggagtcggcgcctccaggctctgaaccgggatccggcagaacggagggctccccatcatcatccataacagtcatggaggggataaaagaggccagaggcctccagtctccgccgggaaccttccggaccaaagtccggttggacaggcggccgaggttacgggcccgcagcaaaagcaccaggtcaaccgggcctttggaagaaccgtcaattgcctgatactcgtacagatcgctcatggggatgcttacctggattccttcccgtggctgaaggcggaggcgggaatctccttcttggacaaaccgggaccttcccacttcaaaaccagtttggaggcagtaccggagttccccacatagccaatgcggatgggatgaagtccagctttcaaataaacgggattcttccggtcacccagatcggaggagacctcggcccccggctcataagttttgtccgcgtcaatcaattccatgccgtgcagacggacaaaagccttgctgcccttattttcatccgtggtcagataaaacgtatatgctccgtcctctggaatcttcacatatcccgtcagctccacaccgcgcttgtccgaaccgttcattttcacggatggggaaggcgtcacgccatgggcggaagcaggcttcttccactggcggaaatccggtacccagggaaaatccccctcatacaaggcccatcgcaacccgggagaaacggttcccttcacatccacggcaggcaccagcgcagaatcaaacactgttttggaaggaagggaagcccggcgattggacaaagcggcggctttcatgcgggcctgaagttccggcttggaggatgcgagatctttgctttcctgcggatcattcaaagtatcaaaaatcatgaaatccttgtccgcatccttcacccccatgcgcaagcctttcaatccatccacaaaaacaatctgctgctggcctcgctgcgctcccttgtgttcgcccaggaaatccttatactccggcgttttgccggcgaaattatattcggcataaacaatgccgggcttctgctggtccgcatgaccggtcagcgtcggcagcagggaaacgccgtcactgcgggctggaaccggcaccccggcgacatccgccagcgtagccagccagtcatggaactgtccaggatgcaggctgatctgccctttgggaatgcgggcgggccagcgtaccagcgtaggcacgcgcatgcctccttcccagcaatcgcgcttaataccgtccatcatgccataactcttgaaaaactgcggattttgcgctccgtgccagtgcctggagtcggcgccaccctcattgtgggggccattgtcggacgagaaaacgatcatcgtattatcgtcaatcttcaaatctttcagcagacggatcaaatcagccacggcatcgtccacgcggcggatcatggtggaatgacgtttggccacatcattcgggaaacgggaattgtccggatgaatataggtatccttattcttttccgccttggcgtcaaaagccgtattcacggattccgtgccttccttctttacccattgcaggcctcctttcaatccgccgccggaaggatagggaacccccggaaccaccagattgccgtggggcgccggaaaagccaggtacaggaaaaacggctttccggtcttgcgggcgaacttgcgctggtccacaatccactgcttggcgcgggcggcaaataaatccgtggaataagccgtctggggcacctggtccttgatatttttccactcgggattggaagcgtaaccgttgtattcgaaaacgtcacgggattcggaaggatagtgaaaatgccctgccaaatggtccaggataccgtaaaaataattgaatccccgctgatgggggccggcggtcatgggcacatggctctggcctccgccgcctacaccccatttgccaatggcggcagtatcatacccggcatcacgcatcacggtacccagcgtatgggaatcttcaataggctggtcgaaacggttgtttctcaccacgcgggaattcccctggtgcacccccagcagcagggaggcgcgcgccggagcgcaaaccggagcggcggaataatgacggcgcagctgaatcccctcccgagccagagcggacagggcaggagtcttgaactcgttctttctctccaccgtccggccattcagcttctgctggctccagttggaatccagatcaccccagcccatgtcgtccaccagaatgaaaataacattgggttttgaagttttgacagaccgggcagccggcttcgttgcctgcccggaagcacccatgcacggaaccagggaagtcagaagaacggatagtaaagataccagcttcatgattcaaagaaaatagactctaaaaaagacgttaaaataaagcgttatcttacatgaattttctcatccctcaagaaaattacgaggaaagggcacagaggattgaatcgccagtattatcggcaaaaaacatcagggaaccagccttcacagccggaacaactacaacccgccatactgcaccaatgagcggcttttctggctgaagccaggaatgggagaaaattcctcctgcattcccggcgccccggtcaccagccccgcccggccatgctttatcctgaataaaacggcaatccccccgccgggcagaaaatacagaaaccggcggaaacagcaatcatgaaccggaacgttccaaaatgtccgcgccaattccggaacagcgttaataaccctgtccggaatagcgaaggcatcagaaacgcttcttcctgtcgtccctgcgggaacgttcgccccagcgttcgccgcggtcactgcggaagcccccgcggtttcccctgaatccgctccggtcactgcggtcccgctctccgcggtaactgttgcggaatcctccattgcggcgggaagagcgcggagttccggaatattccggagcccccttgtcttcacggacattaacttcatagccgcagacggtagccgtcgccagggcctccagaagcaggggcgccacggaagcgtccacttctatcagggaatgcttggggaaaatccggatatcgcccacggctcccttttccatttccaccgtattgtaaaataacccggctatgtctttgggccgcaagccaatcatccggcctccattcataaacagcgtaaccgtatcccccttatgctgccaggaatcacccttctgcgggctctccgcctcctccccggtctgcggcatacgccgcgccctgcgggcgggcttgtcttccggaatgggctgcacttcccggtgcgtacgttcccggagcaagtcaaacagggccgcagccatggcctccggcgcagcctccacttccttcaattcctccggcagcacggcatccggcttgagacgttccaggatatcatccaccagggactctgtccggagctggtccacctgaacggcagtcaacacaggttccggagtcaacttaacgccgatgaaacgttcaatgcggctcatcagggaaaaatcacggcgccccacaaaagtgatggccttccccttgcggccggcgcgtgccgtgcggccgatgcggtgcacgtaatcctccggatcacgcggcaattcaaaattcaccacggcatccacatcgtccacatccaggccgcgagcggcaatatccgtcgccaccagaaggcgcaggctccccttgcggaaggaatccatcacgcgctccctcatcatctggggcatatccccatgaaggcgatccaccggataaccgcgggccgtcagaccgtccaccacgtcatccaccacctttttggtattggcgaacaccagccccattttaatctttccggtgtcaagcagccggctgagtacctcaatccgggaggaaaacaccacttcgtaataaacctgttcaatggtaggcaccgtcagcgtaggccgttcaatggaaatctggatgggctccttcatgaacctgctcaccagacggttgatttccggagacatggtagcggaaaaaaacagggtctgcttcgtttccggcatggcctccgcaatgcgttcgatgtcttccagaaaacccatatccagcatctcgtccgcctcatccagaatcagcatgcggagtccgtccagccttaatgcccccgactccatcagatccatgacgcgtccgggcgtccccaccacaaactgcaccccgcggcgcagggcgtccagttgcggacggaaagaagcccccccgtaaatggggacggcggaaacgccgtccataaataaagcaagcttgtccacctcccggcaaatctgaacggccagttcccgagtaggacaaagagccagcacctgaacgcagcgttcctcaggctcaatgcactccagggccggaatggcgaaggcaagcgtttttccggaacccgtatgggacagccccacaatatcggccccactgatcgcggcgggaatcgcctgctcctgaatggaggaaggagtatcgaagccgagcacttcgatagcctccagaatctccggtgaaataccaagagccgaaaaagaagatgtttgagtcatggggaaaaatgatctgtcaaagtcacggaagaagctgaacattcttccctcccgtgtccagccaaaagaacggaagataccgtagatgccacgatttccgcaaagccgcctgcgaataaaaaaacggctctccccgcttctggtctttactgtcacacacggggttgcaacttgcaggggcgcattcgcgtatgatacaaatatttccctccgaattcatggataaaacgccaaacaaatcacagtcctccctgctggggattttcatcaacatcctcctcccggtgttgattctggactattgcagcgcggggcccgccaatcccctggaacgcccggaaggagaaaatttctggcatatcggcccggtatgggccctcgtcatcgccctttccctcccccttgtctatggtatccgttccctggtcgtctccaggaaatttgacctgatgtccgtcgtaggcatggccggcgtgctgctgacgggtgtcatcagcatcttcgtcatcggcccggaagggcgcatccacagcgccacaccctggctgttcgccggaaaagaagccctgatcccccttatcctggcggcggcggtcgtcgtctcccggtccgccggcacgccccttctcaacatgtttatctacacgccggagttattcgacgtgcgcagaatagaacaaacggtggccgccaacggcgaggaacgggcttatcagaaactgctggcaaactcgtcctggattctggcgggcacgctggttgcctcctccatcggcaatttcttcctgagcctctctttcatgtcttccgtcatacaacagccggaagcggaacagcaagtggcctacaacgccgccatcggcagcatcacctggtggggcttcctgatcatcggaatccccatcctggcagcccttgtcttcatcatgacccgcctgattaaacggctcggcaggctgaccggcctctcgcgggacgaactccttctcaaataacccccaaaccatgcgcctccatacttcatgcatcctggctgccgccatcgcccttcatgcggcgtgggcggacacgccccggttcgaccgggtcttcggttcccatatggtacttccccacgggaaaaacattcccgtttccggtacggccgcccccaacagggaaataaccgtcacttttggaaacactgccctgaaaacaaaaaccgactccaaggggaaatggagcgtcacgctgccccccatgcctccctgcgccacaggccagacgctggcggccgtgcaaaacggggactccgccaaattggaagatgtgctcgtgggagaagtgtggctggcttccggccaatccaacatgctgttccgcctgaaccagaccacgacggccaaagaagacatagcggcttccggagacgaccagctccgtctgctcaacaacgttccgcaagcccacaccaacaatgccccctactccgcgaaagactttgacgccgtcaccacggacaacttctataaagggcaatgggctgccagctctcccgccacctcagggccaatgactgccgtgggctactacttcgggaaaaaactccgcgaagggctgggcattccggtaggcatcatccactcctccctgggaggctcggaaatcgcagcgtggatcccccggcaggttattaatgccaacaacagcttccgcaccctgcgcggtaatcactggctggactccccccttatctccgactgggtgaggggacgggccaggaaaaacatctctccgcgtctgaaccagggctctccggaccatccctacaagccggcgttcctttacgaatccggcatcgcatggacaacggccctccccatcacgggcgtcatctggtatcagggcgaatccgatgcggagatcattgacaatgcccaaaacagcatgctgctgaaaaccatgatctcctcctggagaaaagctttccgtaacccggaaatgcctttcgtcatgatccagctcccccgcatcaacgacccgtcaaaaatccgtgccggatggccggaattccgtgaaatgcaggacgccgtggccaaaaccgttccaaaagtttacagcgtcaacaccattgatcttggctccaccaattccgacgttcatcctccattcaagcgccctgtgggggaacgtgcaggaaatactgccctgaacaaggtttacggtaaaaagatcccctgtgaaggccctgccctcaaggccttcaaaccttccggttccaacatcctggttcaactggatcaagctgccggactgaccaccacggacggcaaagaaccggcccagtttgaaattgccgggacggacggaacttatcatcccgccgcagcggaaatcataaacagaaaaggcaacacagccgttatccgcctctcatcaccggaagtaaaatcccccaaacacgcccggtattgctggaaccgtttcgtgacccccaacctggtcaacggcaaccagctccccgcccgtcccttccggacggacgaacctgttctgaaaaaataacttttaccacaccatcactccatgaaccttcatcttatcctcgcttctctgacagccacactctcactgggcattgcggcacaagctgctcccgccaaagtagcctgtgtgggggacagtatcaccttcggcaccggccttaaacccggagaaacccggtatccgcaagtgctcgccacactcatggggccggactttgacgtcagaggcttcggcaatcccggaaaaacggcaggcgactacccgggccaggcaggacgctggtacggcagcaccagggaacacaagcaagccctggaattcaaggcggatatttatatctgcaaccttggcatcaacgacacgggccgctggtggaaccccgaactgttctccaaaggctatgacgctctgcttcatgcgtggaaaaacgccaatcccaaaacacggttctttgcctgggggctgctggggccggactaccgcggcccgctcaacaaaaaggcatttcccggcaactgctatccggacgtacgtaaatatgcaggctcggacaacggctcatccgccaaccgcccggaagcggaaaaactgatcgccgccgtagcgcgcaagtacaaagtcagtctctttgacgcgctgcacccgctctccgaccatccggaatggtacgttgacgggttgcaccctacggaacagggcgcacggcgcattgcggaaatcacctttgccaagctggcaaaaagcctcaggcttaagcagcccgcccccagattggaaccgggcaccggcaacgtgattatcaacaacccaggcaactccggcatccttttggatggatggaaactgacggacggaaccaatacgctcatctttgaaaactccaccgtcattcatcccaaggacaggcttatcatcgccattggcccggaaactcaaaaagacccgaccaagcccctgcaaatcaagtcctcccaatcccccgcagctttccgcctcattcctgcgaaaaaatattaaaaacttccagaaccgcttatgggaacatgcggaactcctgcatgttcccataagcccggcacacgctattccgcccgcacacacccgcggcaggcggcatgactgcgtcacaggcagtttccccgctatcccggaaactcatttctatcctgttttaattgagcatttctgtctccaaaacggtctacagtgcatggaacagaataaaagcaaatcatccgcatgccgcctgcttggccccctggccaccaacaccagtatggacttcggcgttctgttgctgcgcctgggcgtagcagtcatgatgcttgtgcatggcattcccaaactgggcatgcttatcagcggaaactgggcggcgttccaggatcctctgggaatcggcaattttctgtccctgctgctgtgcgtaggcgcggaattcggatgttccgtcctcctcttgctgggattcctcacccgtctggccgcccttatcctgattattaacatgtgtgtagcgctctttcttgtccttgggctttccggctggggagcgcaggaacttgcggccatctacctgctgatctatctgaccatcttctatacgggaccgggtaaattctccctggatgcctggtggctccggcgcgactgcaagatagaagtggaatgaaaacagctcctcccgcgcggtctatggcaaaaatacttcttttttcactcgccgcggagggagccttcctctaggatgctggtacacccagttcatccgttcaatgtccggcaaactaacctacaagcaatcgggggtcgataccaaagaagcagccgcttttgtatccgacatcagctctcacgttaaaagaacgcaaaaacagagatcccttcaccaggcctttggccttttcgccgctgcctatgatttgagttcctataaggaaccggtcatcgtcaccgggtgcgacggcgtaggcaccaagacggaaattctctttgaactggacatggtggaaaccgccggcaaagacctggtggccatgaacgtcaacgacattcttaccacgggcggcgacccgctccttttcctggattatctgggcatctccaatctggaacgggaacgctcccgcatcacccgcctggtggccggcatgtgcgactacctggaatcctgcaactgcatcctggccggaggggaaacggcggaaatgcccggtgtggtgccggaatccatcgtggaactctccggcttctgcatcggctgttgtgaaaaaagcaaactgattgatccgaaaaccgtccggcccggagacgtattcatcggctacaaatccgacagcttccatgccaacggctggagcctcatccgccgcattctggaagaaaatccggatgtagttgatgaagaggaactccgttcccttcttcagcccacccgcttgtaccatgacgtggtggcagatatgcgccgcttcaatgtcaccccgaaggcatacgcccatatcacggggggaggcctcccggaaaacctggaacgcttcctgggcgactacggcgcagacctctccattccctattgggacaacaccgccgcccagaaaatcctgaagcatgtggatccgcaggaccgcttcaacacctttaacatgggcattggctgggtagctatcgtgagacctgaagatgcggaagccgcattgaaggcaggtccgggcggcacggtcatcggcacgctgagagaaggccgcggcattcatgtcaaagtacagggcgaataaaaacaccatctccttgcaacggatacgccacacttacaggacaatcttttcatcatcatcccatgagcgattttcttaaacacgagtgcggcgtagccgccattcgtctgcttaagcctctctcttattttcaggataaatacggctccaccctctgggcgttcaacaaactgctcatcctgatggaaaagcagtacaaccgcggacaggacggcgcgggcataggctgcgtcaagctgaacatgcccctggggcagccttatctgttccgcacccgggacgccagcaaagacgcccttacgagcatcttcaacgggcaaatcaagaagctcaataaaaaagttcgccgcggcctggtcaacctgaaggatgcggcagacatcaaaaacaacttcgactacggcggggaaatcctgatggggcatctccgctacggcacctccggcctctttgacgaaggttcctgccacccctacctgcgccgcaccaactggccgacccgcaccctgatggttctgggcaacttcaacatgaccaatacgccggaattgaaccagcgaatgattgaacgcggccagcaccccgtcttcggaacggacacgcagactgtccttgaagaaatagggtatcacctggatgaagcccatacggacctctaccgcgccttgcgggacagcggcatgcccggcccggaaattccccatgccatttcctcccggcttaacattcaggaaatcatccataactccgccaagcaatgggacggcggatatgccatcatgggagccatcggcaacggggactacttctgcctgcgggatccgcacggcatccgcccatgccactacctgattacggatgaattcattgccgtggcttccgaacgcgttcccctgatgaccgtctttgaagtggaaagcgaacaggttcaagaacttccgccggccaatatgctctccatcaaagcagacgggacacatgccattacggaatttaccacccctctgaaaccggctccctgctcctttgaaaaaatttacttctcccgcgggaacgatcctatcgtttaccgggaacgcaaagcgctcggcgcggcgttgaccccccaaatcgtggattctcttgaagaccgttttgacaaatccgctatcacctacattcccaacacggcggaaaccgcctactacggcctgctggaaggcttgcgcgtctaccgccgcaagcgcgtgcatgcccagctcctggaggccctgagaaacggcaccctggatgaaaacatgctggacagcgctatcctgaaacgctggccgcgcggtgaaaaaatcgcccacaaggatatcaaaatgcgcacgttcatcacgcaggaaaaaagccgtgcgcagctggtttcccacgtatatgacctcacttacggcgccgtagggccggaagatgtactcgtcgccattgacgactccattgtccgcggcactacgctgagaaggtccatcctccgcatcctgggccgcaccaatccccggaaaatagtcattgcatctactgccccgcaaatccggtacccggactgctacggcattgacatgtccgagctgggcaacttcattgccttccaggcggccgtctccctgatcaagcagcacggacaggcccgtctgctggaagaagtatacaaggcatgcagggaagaactggccaagcccaaggaagaacggcgcaattgcgtgaaggctatttacgaagggttgactgaggctgaaatctcccgggaaatcacccgcctggtcactccgcatgacgctccgtgccccgtggaagtcattttccagaccatcgaaaacctccatgaatccatagaaggcccctgcggcgactggtatttcaccggagattacccaactccgggcggatacaccacagttaatgtggcatacatgcgctggtttgagggtaaagggggccgtgcatacgatttgcccttgtagcggctccctttttttgggtattctgccgacaacatgtcggcacccatttcatacacgaccttggaagacaccgaactggtcgccagggcacgggaaggagattcgcgggcttttgacgaacttgtcattcgccacagccgcaaactccatgctaccctgtaccagatgacggacaactacgacgatgcctatgacatcgcccaggaagcgttctccaaagcctaccgggccttgcgctactttaatggacaaagcgccttttacacatggctgcactccattgccgtcaaccacgccagaaacttcctgaaaaaacgcaaccgcagaatgacctacagtctggacgacgacgagtacggcgaccatacggaaaaggacatgaacatggcggatgaaacggacggggcggacccggaacgccgtacccatttaaatgaattgcagctcaaaatcaacgaagcattgaagaaactttccactaaacacagggaagtcgttgttcttcatgacgtaaaagggctcaaccatacggaaatatccgcccttctcggtatctctgaaggaacgctcagatcacgtctgcactatgcccacaaggaactccaggggctgctggcggaatatctaagttaatcagggaaaaaaatattgaacgtcaattcccgccgccatgtcaaacgcatagttccaaattcgggactgacacattctaacttctattatacttaacatcaacgacgatggataaacaatccacagatcataaagaggaaactctggtggccatgctggcatctttccgcaaggaagcctgttaccatgacaccttcgaggaagatttcctccgcaattttcatctcagaaaggaaaccgatcaggctgcccactctgcttggaaattgctgctcgaacgcctggacaattatctgcagaactttcgtggttggcagtgggtctatgcttccatgtccatcgtgacattagctgcggtaggcgttattatcgcatccggaaacatggatgaaccttctgaatcttacgtatcctccaccaaggataaggaagaaatactcctgacggaaaaagccgttcccgtaagtaaggaaactattgaacgaacctcaaccgaagttgctcccacggaaaaacctgaattcaccacgggagactcttcatatgaaacatcggccaaagacaaccagctgaaacctgattcccatgccgataaaaaaccggtatcccgcgttctcattgagatgtaacaatccatgatggacctggctccgatattgacgggcatagccgttgcaggcctgatttgccaggcaacggccgtgcctgtcccttttaaggtagaagccatcctcccccaggcggaaggagcgccgtatgcgaccatggcggcgcaaatcggtaaagacatgctggcctccttgattccctaccgggttttaaaaaacggaggcgtgacttaccatctcggggacaaaagtaccccgccccttcaggtttgggcccaggaaaagctcacaggcctgacaatctttaaggtggagccagcccgtatatacgacgggcaggcagacctgacccctcccggtattcttaaacgcggcgacaaactgtcctttgccagcagcaaaaatgagaccacgcagggaatttacgtgggcatggaacattccatcggggacaccagtttccccctgcggctcatccgcgcccagttccccaagctggcagtcccccccatcggccaaccatgctacgactctgaaaaccgtctggtcggcattgttctgggcgtttcccgcaaaggaacctgccacctgctgcccgcccgtgccatctccttcctggcaactcatccggaagccaaaagagtgcgcctgggttgcctgctggacatcaactcctcaacccccgtcattgagggccttatcaacggaggtcctcttgcacggggaggaattcagaccggggacatcctcatcaacatcaacgacacgcccattcgcaactacggagacatgctggacgccacttattacctaacaggagacaaacctctgtctatcgaagtcatccgcggcacccaggtggtaacaagcaagggaatcctccccacgcaggatccccgttaatccaaatccgggctccaagtaaatgccagggcttcggccggctcccgctcaaaatcgcccagaaccttctttcaggcttgaactcgcccgccggcgcacttaaaaaagggcgtgcttcaaatcgtcttcaataaaatcagcgctgcggaagtatccagcatccccaccttggaacagttggatctgctcggagacttccaagtctcagaatccaccctccagaccctggatgacgcccgtttcggcaagatggaaaaggatggtaaaattctttatcgctacgtcgccaaagattaccgcatttactttgaagtcatcgaaggcaaagtgatcgtccaccgcgttctgcacgccaacagcctgaacgatttcctgttccgcaccaatatttccccgactgccggggaagatgaaatcctgagccagtccaagcacttctggaaacttatcgacgaaggcaaaaacgcctccaaagcctgaccttttcccattcatggcctgcatcattctgggcgtcaccggctccattgccgcatacaaggcggcggatatcgcttccgccctggtcaaatacggtcatgaagtgcactgcgtctgcacagccaaggcccttgaattcgtcacccccctcaccctgcacacgatttcccgcaaccctgtcttttcctcctttgaggatgaaaagacggactgggttcccccgcacatccaactggcccaacgggcggatcttctgcttatagccccagccacggcaaacaccatggccaatttcgcccatggcttcgctccggacatgctcagttccctctacctggcttgccaatctccagtgcttatttgcccggctatgaacgtccacatgtgggaacatgcggccacgcagcaaaacgcggccgttctgaagcaaaggaaggatcattacatcctcggccccagtgaatccggaattctggcctgcggagcggaaggcgcgggaaaactcatgccggtggacaggattattcaaaaaacactctcccttctgccgtaaggacggcaaaaatcgctccatgcctgtttattggtttgcccccggagaactaaatcttctatcatggatgcatatgaaaatgctcctgttcctcttcggttccctcatgctctgctcctgcggtccggataaatatcccatcagctttcatatggagacgggagcgacggacagcaaaaaattcgcctttgaaagggacggccattactatagcaaggccccctttatttcccataaggacattgaatcctattattccttccctgcgccggacaacacctacggcatcgtcgtcaacgtccggaaaggcctgggcagccgggtggaaggaataaccgcctccaacctgggcaggcaaatactgcccatcgtcaacggccatgccatgcagcccctgcgcctttacagcaaacctgtcacctcaggaaaactggcagtcatgggagggttctccccggcggatcttgccgccatggcggaatttattcccccggcggatcccaagagagaagaacccatcaacaaactggccgccgttaccaagcctcttcttcccagcaaggaccctgctcaggaaaagaaggaggccaaagaccctgaagaacacaaagaccgtaccgtgatcagcacccgccgggggcggatctgagccagcacccctcgtatcagcatgcacggcaaatcctttcctctcctgaccggcattctcctgttcctttggggcatgccattcctgacggcggatattgtagtgcgcttccccacggaaaatacagccctgctggacaaccgcccgcaggacttttacatgtatgtagaccgcaattttgaagggaagaaatcccagccgtgggaagctggagcctacggctttacccggaccctcgtcagaacccaggcaggccccgtatccgtcaaatttcatgagggtatcgacattaaacctctcaggagggatgcttccggcacgccgctggacgacgtgcaccccgtagccggaggcacggtagtccatgcctccgccaaccccacccatagcaattacggccgctatgtggtcattgagcaccagctgaaggacggcccgctttacagcctgtatgcccatctggcctccgtctcctgcaggaaaggcgaccgggtaggaaccggaaacgttattggaaagctgggatactccggggtgggtttgaacaaaacgcgtgctcatgtgcatctggaactctgcctcaagctacaagatgactttgaaaactggtattccagtctgaaactgggcactcccaaccgccacggttcctataacggactcaatctggccggttttgacccggcacccgtcctcctgcaatgcaaggacggggcggaattttccctctctcgccatatctcctccctgccggtccaatacgtcgtgcggtctccctcttccggcgaaccgcccagccttgtcaaacgctaccccttcctgctgaagccggggccctccgaccccaaatcctgggaaatcagtttcacgggagaaggggttcccgtttccgtgactccttccagccaaccgtgcacggaacccgtcgtcatccgggccgttccgcatcctttctcccaactgtacaggacctgcaatcgcgtttccggctccagcaaggaccctaagcttaccgccgccggcaaacgctacatccggctcatcttcatggggcctgaatcataatcctacgatgatgcaaaccttttccagcttccgttttccccatgccgttctcacatcctgcgcggctgtcctgctttccctgggcggcgcttcccctgcagctgccgccccctctgcgggagacacctttccgcaggacaggcaggacctcctaaaaaacaaaaaataccagcagggactgaaagccttggaaaaccgccttcccctggaagccagcaaacacttccaggaatgcctgtcttcccaaaaccttgcggaatcacaaaaagccataatccgcccttttctggcagaagccctgatccgcgccaaaaaaacggaagaaggactgaatgcctgggagcagctgccggactctcccatgaaatcctactggacggcggtaggcctcttcaataaaggctcctttaccaaagccctggaaaaacttaccgctatcccggaaacggatccgctttccctctacgggtttcaattgaaagcccagcttgcgcgccagcttcaggaccggcagcttttactggaaaccctcagcaggctggggcaggcggaatcccccgccgtttcccaccccgcgcgccttcttctgacggatgtactggtgaatcagaaatgttaccagaacgccgccgctattcttgaacaactcaaaacggaaacggaagacgggacggacagcaaccggctcatacgttcatacgccgagctcatagaaggcaagctggccggcaaacagggaaatctggaccaggccatcaaaaccttctccgccgttatggacaacaaatcctatccggaaaaaattcgtgatctgggccgcctggctctcgccaaggcggaaatagcccgggaaaaaagcaatccggaacaggcggaagaggaaacgcggtcccagcctcaggaggaggaagctccgcacaccgccggaacggcggaggaacgcctgttggcgttcattggcggcaaagcggaatccgccttgctgatggacgccttcaacattctgctggaggaagacatctttcgaaccaatccccaggctctggaaaaactcaacggctgggtaaaagccagggatgcatcccgccagccggcagccatgtatgccatgggaagccttcttctggaaaaagatgatctgtcaggcgccgtcaaaatggcggaagaggggctctccaaatatccccagagccttcccgttcaaattctttctctgaataccattactgttttgctggataaaaaccgtctgcaggatgcggaacgtcttatttccaaatatcccggttcatcccctgacctcgtctttcaacagggagccctggctttcctcaaaaaagactactccctggcgcagaaacttttccgggaagcggcccgccgcgcttcggaaacaacggcggaaaacgccttgttcaatgaaaacctggccgccctgaacgccaatgacgcctccggagctgccgctctcatcaaggaagccgcaggctcttcccggctccgggagagcatcctctttgaacaggcccattacgccgctaaaagaatggcccctcaggctgctgaattgctggcaaatttcataactctggcggaaactccggccctgaaaacccaggcgcggctggaccaggtggaagtagccctgaatctcaaccctccggatctggaaaccgtgcaggctatccttcccctgttggaaaaagagcagttgtctccggaacagaccatgcagctggcgcggctgaatattctggaggcggaaagccggcaggaatggcccaacgccattcagtcctgccgacgagccattgccctggattcggaaggcaaacaggcggatatgctttacctcaaactgggagagcttctgtacaaaaacggagacttccatgaagcgcagcttgtcctccagcccttcccctccaaataccctgacagccctcttcaggcggcagccctctttctggcaggaaaagccgcccagcaaagcaataccggcagcacgctgaacgccgccctgaacatcttcaaaaccctaggcacgggggacaccccctttgcccagcctgccagaatagaagaagcctccgttctgctgcgcatggggaaagcggaccaatgcatcgccgccctggaaaacctgctttcctccccattgccgcgctacatgcgcctgctggccctctccatccaggcggatgcctgggtagctaaggaagatacccattcggacactctttgcaaggccatcaacctctgtacggaaatcctggacacgcccaacctgggactggcctggaaattcaaggctctgacccagcgggcccagttctatgaacgaatgaacgaacaaaaaaaggcactggatgactatgcctccattctggcccatacgcccagcggaagttccgccaacaaacgcagggactggcactggttctacaacgccggcttcgcctccatccgcctgctgggccagcttcaggactgggacggagccctggcactggcaaaaaaactggcgcagacttccggccccagagccagggaagcagcggcttacgcgcgccgcatccagctggaacatttcatttggcaggatgaaccggaagcctccgcgccggaaaacggaaagccggcaacaccggatcaaactgcggattaagaaacctttcctcctgccatggataccccccccacagcaaaaaactggagactcaacgcagcagccatcatcatggacgctgaaggctgtgtattgctgggcaaggacagcggccgcaacccgtactggcactttccgcagggaggcgtcattaaacacgaaagcattgaacagactcttgcgcgggaggtatgggaggaagtgggcctgcgccccacggaatacaccattgtcagccgcctgcccggcctgcgttacaaatacccttccaacaaccgtaaagttacgcgctggataggccaggaacaaacctactttcttgtgcgctgcaaaaccagacgccctaaaacggatttgcaccgcagccccgaattttcaaaaacgaaatggattcccctccagaatctcaaactggaaatgttccccaaattcaaaaggaaagtcatcaaaaacgcccttcagcaattcttcgggcccggctttccttccaaacatgccgctgtgaaaacatcttccccctcctcaccctcatcttcaacactaacttcgcgtacgatgaaccgttacctggtgcctccgggcaaaaaactacgtttaaaggattattctccggatgacaaatctcttttctccggaaccaaggaagaatccctgattgaattcgacaaactgagggaagaactgcaggaactgcaaaaaaaactttttgcccagcacaagcacaaaattctggttattcttcaggctatggatgcagggggcaaggacggctgcgtcaagcatgtcttctcccgggtggatccgcaggggctgcacgtagtacccttcaaaaaacccactactgaggaactggaccacgatttcctgtggcgcgttcacaaagaagtccccgccaaagggcagatcgccatcttcaaccgttcccattacgaagatatcattgccgtccgcgtgaaaaaaatcttcccggacccagtctggaaacgccgctacaagcatgtcctcgactttgaatccatgcttgcggaagaaggaaccgtcatcatcaagctattcctaaacatctccaaagaagaacagaaaaaacggctggaatccagacttcaggacccggataaactttggaaattctgcatggatgacctggatgaccggaatcgttgggatgaattccagacagcctaccaggatctcattgaaaaaacgtctactccggaagctccctggtacatcatcccggcagaccggaaatggtacagaaacctggttgtcgcccgcctgatggtagaaaaactgcgccatctccagctttcgctccccactcccaactttgatcctgcctccatcatcattccagattgataaaatctgtcataacgataactaatttgtgcatcgtaaaattatttttgtacatttctcggtattccgttgtcccattattacaaaatctgcattattcacaataacaatcaaaacttagaatttctaacgcttgactgttctagtgaaaaattgttagaaaacaacttaacgcctagaacgtgtaaacattctacatagaaaaacaaaatcaaatgtatttagcatcccaacgcaaggagttcattctgaaaacgctggctgaacatggagctgcaaggaccatcgctctggccaaacagatgaaggtcacggatgaaacggtccgcaatgatttgattaaccttgaaaaacgcggcttcctcaagcgcgtccacggcggcgctctggcgcttactcataaatccctccatgaagacattgtcactcaagacgatgtgtctatcaggattgcaaaaaaaaccgttcagaatattcccgcttccgtggttatgttcattgacagcagcaccatgggctaccaaatatgcaaccacatcaattccaaggatacgcatgtggtttccaacaaccccacgttgctgacccggcttgaaggcattccgaacctgagtttctattgcacgggcgggcacttcgaccgtgaagccctggtctatgtagggcaggacgccgccaaggccgccgggtccctgagcattgacatggtcgtgctgacgccggactgctactcccccaagcatggcgccggatacaagaacatgctgcaatccgaattcatcaagagcgtcatccccgcggatgccaaggtaatcatcgctatgccttccaccagcgtagcgaacaacccggcattctataccgttgcgccctcccaggtttccatgctcatcactgatgaggccctttctccggaaatggccgaccagattgaaaagagcggcgtcaaggtggagctcgcctgacgccggcctgctttacagggggcggaagttcttcggaacttccgccttttttatgatgatcatatactctctcctttccattccgtccagtactcccggcttcccgtcagctcatcttccctggagccgatttcttcaaaccctccgcgccgatagaatgcgcgggcgtgggcattctcttcataggcccctaccgtcagcattcccttgcttgttccttcacccaatccggcaacgctgtgcctattccttcacactggcgctccggcgccacaaacagagcggcttcttccccttcccccaccaggcaggcaaacccgacaacacggccgccgtccctgcacatccatgacccttacgattacttaggaatgcacccttaccgtgatttatggccggtcacaccatttttgagctgataacagtttatacttgaccatcccctgaatttatctaaaaaggaaaatcgcttatttagtatttgaaaatgagtaaaggtaggcttgtttcagaattgtataaataaacgaaaaacaccatagattttctgcaataaacatggaaaagattgctgcttccctgttggcgacagctggtattgcctgcgcccaaacatacaactacgattcctcctctgaaacgcttgtgataacaggcaagggcaatacggttgccgaccgcattactctggaaggaccaataacccccgggagcacagtccctgggacttcggaaatattcggagacacaaaagaaattatcttaaaagacgtttggacatctcccgattcgatccgcattaaatatgtggagccgacttctgagggaaacaacacgacgctgaaattagaaaattcgcgtttgggcgcatcgggggactttgataaaggcggcacggggttaatccttattttggattcccaatccagtcttgaactatacgggaaccgcctcaccaacacaatcagaatcgaaaaccaaggcaacataaaatgcacaaacggcactgtaagtgcaagctcgtatttgtgggacaacaagacaaccacaggttcttcaggcgttctgggcggaagtggatattatagcttcgggaacgtttcctctatcgagactaataaagatttcggactcatcaagaccagcggtcaaattacagacctcgaaatttcgggaatttacactgtggacgggaattccgcaaaaacaatcggcgacgactcctacatcgtgggtgtgaacacgtcgagcagttctgacgggcaggcgatgacgatttcgggttcacttacaatcaatgcaaaacaaggcacggggataggtatactggccaaccagctcggcagcgacgacgtttcgctcaaaaataactattcgggccaaatttacgtgacagcaaaagacgccttcggtgtaaaagttggtaaaaacgcggccatggacccctctgctgcgggcgacatctactcgctttccgtgggcgaactcgacatcgaaagcacaatcacttcgggcagcacgcagggtgaagcaacgggtatatacgcaaaaagtgtcaagcgcgatttgacagcaaatgcaatcacagtaaaggggtacaccaatgcaaccggtatccatctgacggaaggcggccgcaacctcaccatatccgatatgcaagtaagcgcgggaatcagcggcaacgcagcaggcataatcgccgcgccaggcagagataaccctgtttccacagccggaaacctcgaaaacatcaggatagataatttggaggtttcaggcggcgcagatgccacgggtatctttgcaaactccattacaaaatcgggtcaaaatgaaaacatcataggcaacattacggtttcgtctgaaaacggattggcaaacggtatttttgccgacaacgctgacatcaccctcggcggcaaaatcctatcctcaagcgaaaactccaacgcctacggaatttgggcggaaaacgagcttcacttaaaaatgcttgatggttcggaaatctcggcaatcgctgcaaacgaaaactccagcacccaggcaatccgctcgaaaaacctctatctgacattcgacggcagcgcgacgataaacggcgacctcatggcggacgccggcatggagctaaacaacggaggcaatgtagtcgtcaacggcaatatcgagggtaaacatcttgccgcagaatcaacaatcggcacggtttcaggcaaaatgaaattcgactcggttgccggcctgaacattaccgcatcagtgggttcgctcgaaatcggtatgtcgggcgaggattcggggtatattaaagtcaacacagtcgagacatcagcaaacatttcaaacgccgttttggtgacaatcgaaaacgcaaacggcaacgtctcgttcaactcggttaattcggcgacggtaaacaacgccgttggcgacatttcagcaacaaatgtcactaacggactgaacgtcggcgatgtcggcaacatccgcgtaagcggtacgaatgtcaatgtgcttgacggcaaaactgtgagcggcgacatcgtttcgacgacagacctcatactgtcaaacgaaggttcggcaacactcacgggttcagtttcggcgggcgggaacagacttacgataaacagcgtcttcggcataaactcttcagccgcgaccgtaatcagcgcggggacactcgggggcgcgggcttgcgcggcaccatcaacaaccactacgacaacatcttcggtttctccgcaaccgacgactcttcgggaagcctcaccgccgcaaccgccttgaaaggcacgcacgacgtcgtctcgaacaacatttcgggcatgatcgacggcgacttggatccttttgaaaacacctacatcaccgtgaagtacgtcaacgtcggcagcaatgtcggctacgaaatcgagaagaacacctatcttgccgaagcagttgcgacaaacgaattcgaaaaggcgttggcaaaaacctacgacgatcttgaatacatcgacggcgacgacgcggcgaacgaggcggcagttaccaaaaaacgtaatttcgccgcaatggtaaaaagcggcacactgggtgcgatacttccgcagtcggtagtgcacagcgtgcgcatgaacatggatcttgccgacataatccacctcgacacgctcaaccgcacgagcgcggcaatcgacggcctcggcgcaaaaagcagcggtacggaagtttcgggggggcgtttttcaggcattaccgtccgcaacataaacaggtttgccacctacggcggcgatgaaaacatggatgggtcgagcgactatatttcgggcggcttggtgaattttgaatacacggcgggtaacacgtttcttgcgggcttcggcttcggcggttttcaggcaaaatcgtcaggcaagggcaactgcggcaaggcggaaacccaaagccttgcggtcaacgcctacaccgactggcggttcttcggcaactttgactggtacttcggcgcgacctatgctttcggcatgaacaaagccgaaaggatgaacatcctgaacaaaagcaaagccgattggaattcaaacctcatcggtgtcttcacgggcgttcgatacgcgtggaagccttttgccgacaccggattttacctgaaacccacaatcggcgtaaacgcggacttcctgatgaacccgtcgttcacggaaaaaagcggggaagaacgcatgagcgcggaatcagaaaactatacaagcgtaaagtcgcttgtgggaatcgagggcacttacgcgttttcaaacggcttctactttacgggcagaatgttctacacgcacgaattctgcgacgaccgctacggagtaaacgccatgctcggctcttccttcataagggtaaggggctggaaaatggacagggacgctggcgtattcggcgcaggcatcggatacagcatcacggaacagtggagcgtctatgccgactatgccgcggacgtttcggacaaagtgcgccacaacgtcaatatgggcgtcacgtttaaattttaagtcgattcgcgaatgagcaaaaaatctgcaatatatttctgccgcaatagaatcgcctcataaacatctgtaaaagcattgatagggagggaaccgctgttactgagctccggtgtcatggaacacaaacgactttctgtaaaagcgccccagcctctcagcccttccattctggcctgtacacgagcaccgggccggtacgcgaagactgaacgccgcgcaccttccgaacggcggagcccaccagggcggcagcctgttccacctcctcctgcgtcgtcatgaaagacagggaaaaacgcagggaggaacgtaccgcctcatcagacaatcccatggccgtcagcacgtgggaaggcatcggctgcagcgtatggcaggcagacccagccgaacacagcaggccggcaggttccagcaacagcatcagcgcttccgccgtacatccgtcaaacgccagattggaagtattgggaatacgttccgttccgccggaatgcaccgtcacgccgcccacctgtgtccgcaggagagactcaaaagaatcccgcatccgggacagccgtccggcgtcctcctccaagtgcctcaatgccgcccgcgccgccgcaccaaaaccaatgattcccggaacattctccgtgccggacctcaagccgtactcctgccccccgccgaacagcaaaggggaaaaaggagcccccgctctcctgtacagacatccaatccccttggggccatggaatttgtgtgcggatacggaagcataatctacttccattccatgcaaatccacgggaatttttccggcgcactgcactatatccaaatgcacgggaactccatgcttcctggcggaggaacacaaaaccggcgcatcctgcaatgcgcctgtctcattattggcccaggcaaaagaaacgccggatacgccccctgcgcacatcgactcccatttttccggaatcgctctcccttccctgtccacggggcagacacagccgcagcccagggccagggccgtcttcaaggaggcgtcatggtccgtggacaaaacgcctatccccccctcctgtctcccggccatctggcggaaagccatattggacgcttccgttccgccggaagtaaacacaatttccgaaggaaatgcgcccaacagagcggcaacggccgcacgggcctcctccaccgcctcacgcacatgcctggcacagccataaccggcggacgggttgaaaaaccgttcctttaaaaacggctccatggcctcgtaaacctccggagccagcggtgtggtggcgttattatcccaataaatcacgccttcataactcccccaatcgcgggaaggagtcaagccggaacataatgcgcagctgcacaagatcactcttcacttttacccgtgattccgcataatgcctctcatgcgttttcttatcacggcaggccccaccagggaagctattgaccccgtcagatacctcaccaaccactcctccgggaaaatggggtattgcctggcggaagcggctgttcacgaaggccacagcgtccttctcatctccggccccacttccctggacattccgcacggcgtggacttcctgccggttgaatgtgcacaggaaatgtatgatgctgtcaaaaaccaggctccctacgccgacgccgccatcctcagcgccgccgtagcggattatcgccccgtctccgttccggaccgcaaaatcaagaaaacgggggaacgcatgattttggagctggaacgtactgcggacattttgggctccatgcgtgcggaattcggcttcagcggcattctggtaggctttgcggcggaaacccatgacgtggaaaattacgcgcgcggcaaactggaacgcaagcggtgcgatatgattgtggccaacgacgtttcccgcagtgacattggttttaactcctctgaaaatgaagtgctgctcgtttacccggaccggacggagtttctggaaaaagcgcccaaagcacaaattgcccttcaaatcattgagcgcgcttgccgtctcgcactgggaaaagctccgtcatggcgcacggcagacccgttccacgcttgaagcggcagggagtttgccccacgatccaatgccggcatataaatgccggccacctttcccagaaccacattttcacttttcatgcccgtcactcttcaggatttaggctggaacaaccattttcaacgcgctttcgacgccgttgccaaaccaggctggatgccggggcgtctcatccgggaaacgaaaatcaacttcactgctcttctggacggcggggaagatgtggacgccgtcgtcagcggcaaactctggcatgatgcggccacggatgcggaactgcccgctgttggagactgggtggcgattgatccgggagaagcgggagacgaagccgtcatacgcaccattctcccgcgccagacctgtttttcccgcaaagctccagggaaaagcagcgcggaacaggtattgggaaccaatgtggatatcgtggccgtagtgacggagccgggaacggacttcaaccccaggcgcatggagcgctactttacactcatccgccgcagcggagcatctcctctcatcctgcttaacaaaacggatcttttttccagggaggaagtggaaaacgccatgcagattctgcgggagctctccccggaatgcgccatcatcagcatcagcgccctgcacaacaggggaatcacggaattccgcaaatgcctctccaagggaaaaaccatctgcatcgtcggctcctcaggcgttgggaaatccaccctggtcaataccctgctgggggatgaatggctctggacgggagaagtcaatgaagtaaccggcaaagggcgccatacgacagtggcgcgggaactggtgctcctcaagcatggaggtttgctgattgacaatcccggcatacgggaaatccagatgtggactgatgaacataccctccgtgaaagctttgcggatttgacggagctggcccatgaatgcaaatttgcggattgcagccacggtaaagattccggctgcgccatcaggaaagccgtggacgaggggaagctggacaaggagcggtacttaaacttcctgaatttggaaaatgaaatcgcccggcttgccaaacgtcagaaaaaaaggcaaatgaacgtggaacgggccggaaaaagagaccggaaagtgcaggcccggaactatgaagaccgcgtggaactggaacgccgccacaaacccaaccaccgcagccatgactgattcgccgtcaaaattggcttgtcaaactgcaaaaacacacctaatggtgaagaatgctattttcacgcggcctcatccgaactttcctggctcttctggcattgggggcgattcccttatctgcagaagaacagccgcttcctgctcaaggcggtcccgtcgtgtccattactgacctgaagcccgtaaagctggagagggatgctcacagcaagcttcttgtagcgcaatgcactgtcaatggagtcccatgcaatcttattgtggacacggcggcttcccacaccacatttgatatcaaattcatcaaaaagaattttcccggcctgccgcttgaagacgttcaaatagcccctggttccaacgtccatgccgtcccccggctatttgccatgcggtccttctccatgggagggcttcatatcaaaaacttcttcggccttgccctggatcttactcccctgcaaaaggacatgcaggtgaagatagacggcatcctgggcatcaactacctggggttctctccgttcctgctgtccgtcaggaatgcttccctgcagtttctggaacgctcccgcttcccccaacacaggaaaccgctggatgtggaacgtgatccttccggaattttttacatccgctgttcccgggggggagatactttcccgctggctcttgactccggctcttctctttccatggccccgctggaacagtggcccgcagatccggacggcaatcagctcaccaccaaggcaaccgacattaacggacacaatggggactgcactgttatgaaactgggtatcccctccacgctccgcatgggaccggacttccaaatggacggcctttccttcgccgtaacgggaacagggggccgataccagatcggcgtggatactttccagcattttgacatcatcattgatgctccgcagggggaagtcttcgcccttcctccccattccaggccggagccccaggggcaaaaagcccccgatatcaaacaggaatcttgagcatgatgcagatcatgcgaatggtccgggccgtagcgccgaaatgggccttcaacgccacctgggcgcgggaagactgggcatgagccagcagggggttgtccagcatctccttgagcacgtctgccaggcggttttcatcacacctggcaattccgtccactccttcaagcagctggaccagtgcatcgaaattttccatatggggccccgtcagcacgggcacgccacaggcgacggcttcagccggattctgtccaccgtccgccaaaaagctttttccgatcacggctacatccgccagcgcggtccagtccctcaattcccccgtcgtatccgcgatgtaacaaacatgatccttcagggtttctggaatctcgccatcagtccgcagcacgcactgccagccctgggcctccagttcccgcaccacggcatggcggcgttccgcatgcctgggcacgatcagggggaagccccccgccttgcgcgccgcttctgcgatcagaacttcctccccgtcatgcgtgctggcggccagcactacaggcttgccgcgtttcagtttgtccaaaatggaggcaaactccgcattagtctccctgcgctccgccatttgctggtcaaatttgatgcttcccgtcacgtggataatggaggaacgcacgcccacggattcaaacctccggacatcccccttgtcctgtacgcccattgcgtcaaggaaggaaaaataatactttgaaatccatttaaatgcgcggtagcggctctcggacctggcggacatacgggcattaatcatcgccatgggtatgccgcgcaccttggctgcacgggcaaaattcggccacaactcggcctccaccaggacaatggcctccggttcaaaacggtcaaaacacctccccggcagccccagaaggtcaaagggggcataaatcacgcgcacgccgggaatctgcgcactcactgccgtagcatgccccgtagccgtactggtagccagcacggcggaacctccgcgttcccggagccacgcccggagaaacttgagagccagcaccacttcacccacgctcacggcatgcacatacaacacccctttcggctcccggttataggagacccggtacagcccgaaacgctccagaagccccgtgccgaatccgcctctcctcttctgcttaagcagataggaaggcagcgttaccagccacccgacggtatacaggatattgtaacagaaggaaaacaggaaggctttcatcttacttctcaggcaattggtagaacagcagcatatttttcccgtaccggcgggtatccaccagattcaggccgtcaatttccgcggcgccttcccttccggtaccccagccctcctgcacttccgcaataaacacgccaccacccttcaaaagtccggcaactccggcctccgccagttcaacaataaagtcgcggtccgccggccccttgcaataaggaggatctgcaaaaataatatcgtacttcctgccggccagcagttcccttctcacgaactggacggcatctccctggatgacagttccgccttccaagcccgtcttgacgagattggccctggccgccgcgcaggagagacgggaaaaatccaccatgcgggcgtctctcgccccacggctgagggcctccaggccgaaggcgccggacccggcaaataaatccagcacgtcggcccggtccatcagcgggttcaggatggaaaaaacggcttccctgacccggtctgtcgtgggacgaacttcccccttgggaacagacagggttatgccgccggcctttccgctgatgatacgcattgttgtcttaccggaaatgaaaggaacatcatatccctactggcgagccttggccttggccttttccagcaaagggtcacccgcgatgcgggtaacgggaacacgcagaacgatggactggttggcaatggcaacgttgtccgggttcttttcagacatgttgtaaacgaaataggcatacttgccgtccttggtcttgcccgcaatgatagtctccgtcagggtggaaagaatggttttcttttccattgtccattccttgccactccacgcgccgtatacattcagatcgtcataggacacgtcccctttcagggtcagggttccgttgggagaaatccatgacttggtgctggaatcatacttcagcgtgctcatcggcaacggcccctgctgcgccacagcagccaaatcccagatattccgttcccccgaggcgaaaatacccagggccacaggggccacttcctgcacctgcttcagcttccagcactccaggtacttggcatattcgtccttggtccagcccaggcgctcatcataaggaacgggctggccggggacaatctggctgacaagctccttcttgtccttgtcgggcagggaggcgaaaacgccgtctatcttttccatgaacggctgcaggctttcatcaagcacaacgctgacggcggcggcttccgccattttgccgaccgggagatattcgtcaactatttccggcttttccgctgcggacagggaggaaaccagaacagggactatcagtgttaaagccagattacggagcgctttcataacgtgttcgtatattttactcaacaaaagacccttggcaagagtcaaagtgagtgttatccgtatgtacatcatgagttggaagttacttttcactaccctgtccgccgctctgagccttgcttcctgcgtgtccaccccggcatcgcgcatccagaaaaacccggcccttttcaattccctcccgcccagccagaaaacactggtggaatccggacaaattgctgaaggaatgtctccgccggccgttttcctggcctggggggacccctccgccgtagcggaaggccaccttaacgggaaatccgccacccgctggatttattcctccctccagccggtttacacccctcccccctctttctgggccggcccctactggggcggtccctactgggggccgggcttctaccgtccctattatccttattacaatgatgtcacctatgtgccggtaaacaccggatacgtgcttttcatcaacggcaaggtgcaatcttgggaacgcaggcgctgacggaaacggagcctgccctatggcacggaatgcgccggcgcagcagaaggagggcaatctcccgctgatgcgccgtttttctctccgcgtttcctaatgccgctctaatccccgcccctggacagggggcgttccagtttctcccggaatttgggaaagaactccttcaattccccggaaaccttcggatattccagcctcatctccgccagggcctccacaatggcgcacatgcagacaagccgggaataccatttgttgtccgccggcaccacataccatggagcctcccgggaagaagtatggcgtatcatctcctcatacgctttctggtactggtcccagaattcgcgttcatgaatatccccttcagaaaacttccaatttttgtccggagtatccagccgtgccaaaaggcgttttctctgttcctctggggaaaggttgaggaatattttcacaatgctcgtcctgttggcgagcaggtggcgttccaggttattgatggatctgaacctctcctcccagaaagcactcttggcatgggagggattaaatccctctccggccagaaactccggatgcacgcgcacgctaaggacttcttcataataggaacggttgaaaatgccaatcatcccccgcctggggaggcgcgctacgcacctccacagaaaatcatggctccgttccagcgtggaaggctgcttaaagctgctgactacgcacccttgcggattgacgcctcccatcacatgcttcacaatgccatcctttcccgcgctgtccatcgcctgcagcaccaccagcagcgcatgagactcgctggcatacaatacttcctgaagctgctccagcaattcgattcccttttccagcttatccacagcctcttttttgctgtctttgcccagcttcccgagatcgccgggatcatagcgggacaacttgaatcccctgccgtccgtcacccggtacggttcaataaatttcctgcatcttttgaccaggcgggaagaaatatccatcatttctataatgacactgtctcttctcaaaatgttgaaacaacagcaaaaacatcaatacccctctcgttgggagattccaccccgccgatagacgacaaacccccggcataattcggaacgttcatacttgccggaagactctatgtactggagaaaagcagcataatcggatggccgggaaactacgatcaccttataatcagaccatttgtcctttaacgggccgggaatccatccataaaactcctttccggctccattgcataaaagtaaaatgtcaacatgactgctctgcaataatttgcaataagataccgcagagcggaaatcttcacggccatacaaatcattgcaacgaatacgaatatcgctcaccgcccaaacaatcatcattaataggaacaggatagtttgggcaatcctggggaacgaccaatcccatgacgccactagggaccaggccagacacaatacaggcaataacggcgcgcaatgccgtccggaaaaacggaaatccatcatttccgttccataaaggaatacggcccctggaagcaatatcaacaccagcaaagcaggaaccaagggcctctcagcccgcttattccacaaaatgatgccgcaggcagaaccggccagaagaatggcgccggagatcatccctgcccccaatccgttcatattccataaagcatcaggagtcatgcacatcctcaattctagacgggaaggccccatgccggccaatcccgataactcgtacatggaagcgcatgcattgactatccaggaggaagatatggaaaccgcacgggcgcccaagaaaagagtgtaaagataatatgctcccaacccggaaaatggaaaaatccaccagagcagggctcgccgaaacctccgccctccaaactgccggaatgccatgaccatgaatgccgcggcaaaaccgagcgcccatacaacccctgtcaggcttgtaagacataaaaaaacagaaaaccaaaaaagacatggaattttaccggttctccccggctaacctgccaaaacaacatggagacagcgcaagaggccgctatctgcaacatatagggccgcaactcgttagaataataaacaaaaaacggtgaaatcaaaagaatcaccagcgcctttggttcctttctgaaaaaccaggatgataaaaatacccagaatatattaaataacctcagcatccattcagactccgcacccgtcagatgatgccacaaaaataaaaggtagtaataaaaggccatttgagcatcgctaccgccaatttcacaaatcttcttccaacatccctccattccctgctgcatggcgcacaatgcagtacaacattcatcaatccaaaaactttggttattcagggaaaaaaagaaagacaaaaaaggtaaaatccaccaatatttgatgaccccgtcattgccttccggcgccctcttttgtcccctgcacatagtgcaaggcaacatagcggattgcatatccgccgcctgcttttttgcaggaagaaatcacatatccatatgaatatcaatagataaatatgaaaatagatttgttttttcttcttatctctgcaactttgaaaagttattgatgtttttatcttagaaaaatatgttgccaccggatatgcaatccgcaaaaaaatgttgtttatacggatattgcgtaaaataaaaaacttatccaccaaagcggacctgatctgatggggtattttccagcttgcagtcctcaagggtccatgtgcggggaggcagcaccttgttatctttaatcagaatattggcgcatcttctgaattggaaaggtttctgcccccatcccttaaactcgtcattgtaaatgaccttattattgatgaacttgaggttgtccgtggaaatggcgaacagcagcggcacatcgaacgtcttgaaaacattattttctatcagcacattgcgatgatagtaatccctctgcctgtccagctgcttgacttccgggtaaatggaaatgatggcattcgtaaactggtaacgcgaggtcaggttattaatgaatgtatttttgcggatcaccacttcatggcaggcgccgctttcataccacccctgggcatcccctgccaatagaatggcggagccggaggaatggtcaaacaaattgccctccaccagcactctctccggcgttgtaaaaagagatcctctggcacggttgttgcggacgatattgttgcggaaaaccacggaagggtaaaaatccgcattctccacggcatccccggccctgacggaggaggggagcggctcttccaccgtaatcaccatctccgcggaattctttttcactgccgtcttcacagtggccgttccgccgggttccagcgtaggaccgttgatgaaacggattttttcaccgggaagaaacacctcaaaccccaccgcctgccgatgcatgtatttgcacttcagggtatgtctgtccactacttccatcacgcccaggcaggtggaatgaacattgatggcatcatccatcatcccttcgaacagggctttctccaccacgattccgccccgggtattggaaaaatgggttgcgtccgctccggcggtgtgtacgcgccctgtgcctttcctgaccatgactccgccgcctttcatatgaaagtcctccgatcgctggaccagcagggccatgcctgagctctggtgcagagatacgtcattcagtgatgttttccgagcccggtacaccacgcatcccggatgggggcggttataattccgaagaaccagcgtatcccccggcttgattcccttctgcctgaggttccaggacaaacggagacggctcccgcccaacggctccacatgcccgttccagccgatgtccgatgtattggcgataatatgtcccgtccctttctcaaaggccatgcagcttcccattccttcttcccagcctttcccctggaaaacgaacctgttgttccggatttcgtaagggtaggcctttttgtctatttccacttccgtgaaccggtcatccgtcttcacgacgcgcgcctccgtacaccaggaccgttcgtaatccacggccaaacggttgacgctgacattttcgcagtccatcaccagcaggggaaccaccttgccgtgaaaaagaaacagggaatcattgccctccacgcggacatctctcaaatcggccaggggcacgcacaccggatgaatcagcggctggtcatggttggaaatatggaagctcatgttcaaagccccctccggataaaaatggtaaacgcccccggggatgttcaaaacgcctccgccctgctttcggagagcggaaacggctgccctcagcgccggcccctggtcttttctgacgccgggaaccatgccgaattcagaggcattcaccacagctcccttcgccccctgcccacttcctcccgtcttccaggccaggtccacccagtccgcatgatcgtaggaattgttgtccacccggtcggccatcaggtaaagatgccgtatgccgttttccgccaccggaatggaaaacttcttcgcggccatccccctcttcatcacgccggaactccacaaaaccccggaaccgctcatcacgcggaattccacgcttccgtccccatccgcaccgtcatcaacgccgcatgctccttccagcctcagaattttcggggtttccggaacgggaaggggaatcatggacgtagcgtgcgtaccgattcccgtggcatatttcttgctgcctatgctcaaccccgcattactgaaagaacggtccagccgggtttctcccgtctcctggcgggccatcagcaggctggaggcaggcactttcacggcgatggctccagattgggcagcttcttccccgcctagggactgcgccgggaaaaatcccgccagacacgctgccgctgcaaaactccatgaaaacatccggatgaacatatatcctttatacccttttcccgtttttcttctatcggaaaaatttcaatccctgaaaaaggccatcattaagagaaaagagagattgccttccccgtcaaattcaggaacactgtttccatgcgatcagcattcttcctactgcccggcatcccgctggcactttcctcctgcgggcgaggaggcgccacgcttgaaacggataacgtccaggcggaatggttccccaacggcagcagaacggagattgtcctggaaagggaaagcgaacccgtttccgaacgggaaatccggcattccccttccggcatgactcttttttaccattcgctgggggaaggaagaggaacgctggaaagcacaggaagggggacggaaacggctacagtaacatacagccagggagcctcttccacagtgctgcatttcaaaacgccctcccgggaagtactcctgaatgatgtaagccgcctggacgcggacggcaaaacggccctcctgaacggctggagctgcctggaacggggcacagcccggctccgcaccgggacagccggaaccatgatcacgaagaaaaatttcccatgaaccttctgaggctactgaaaacgggaacatggaaaatcccgtgcacacttctgcttgccggagcgctggccctggcgtgcctccagtgctccgtccgctccctggtgtacctgccgccccagcccagggacaaaaccgcgtatctggaaaaacgggccgcctgggaaccgcatcggcgcaccttccaccataatggggccaaactcagcggctggcttattgaaaagaaggggcaacccctcctggtatattacgggggaaacgccatggacatctccatgatgcttccctacctggaccggtttccccatgctaagctcctggtcaattaccgcgggtacgggctcagcaccggcatccccacggaacaggatatcatgggagactccctggctattcttgactccgtgctgaaggaaaccggaagaacgccggatgacgtcattctggtcgggcaaagcctcggttccggagtcgctacccaggtagcctctgtcagacacgtgaaaaaactggtgctgctggttccttttgacagccttttggaaaccgcccggggcctctttccgtacctgcccgtcaggcttctccttccggaccacttccggtcggacctggccgcgcccaaagtcgcctgccctgtcagcattctggccgcgggagcggatgaagtcattccgccgaaccacgccaaacggcttcgggactgtttctccgtaccggtcagctaccaggaattccccggagccatgcataataccatctggtccagccccggctttgacaaagcattttcccaaagcatcgggtactaatccgtttcattccgcaggggccagagacacgcggcgcaggcagcttccttcatgttccagcaacagccatgaggcttcttccggaagcgcttccggaaacaggttggcccattcgacaatgagcacggtctctccgtccagatactcttcccaccctatgccggtcagctcggactcatccttcaggcggtaaaaatcaaaatggcacgccggcagacggccgtcagcatgctcatgcaccagggaaaatgtcgggctggctgccgcctcggagctccccagcccctccataatgccctgggtcaggtgcgtctttccggcccccagctcacccaccacgcccagaatttcaccgggcattaaaattttacctattcgccttcccagttccctcatttcctccggggaatgagtcaaaacgggaccgtttttaaaaattttatgccattcgctcattttttcatgaaattttgcttgtctaaaagaaagtcatatggtttattgcggctcccgcatctgcgggcgaaccttaacagtgatagcaatggcatacgcaattttcaaaacaggtggcaagcagtaccgcgtccagacgggcgacgtgatcgacgttgaatgcatcaatacccttgaagagggggccgaagcaagcttcgatcaggtgcttatggtggaaaatgacggaaaagtgaccgtcggcgcccccatggtggaaggagctacagtctccgccaaggtggtcagccagttccgcggcaaaaagatcatcgctttcaaattcaagcgccgcaagggcttccacaagaaaaaaggttcccgccgcgccatgacgaagctggaaatcaccgctatcaacgcctaatctcaacccttaatttttattatcttatggctcacaagaaaggtcaaggttctgtcaagaacggtcgcgactcccgcagcaagcgcctcggcgttaaaaaattcggcggacaggaagtgatcgcgggcaacatcatcatccgccagcgcggcaccaagtggcaccccggcaagggcgtaggcatgggtcgtgactacaccatcttctccctggtggacggccgcgtgttctttgaccgcgaaggccgccgcgtcaatgtggctccggaaggatctgaagccgccaactaaattacggattactctatctccctgcaggggcggccatccacagggatgaccgcccctttttctacccttctccgcgctccaacaaataacaggaattgttcttgcaaaacaattacccctcccccactatccacgcagagcatgaaaaataagatatgaatcccaaaacagattccaagcaggccgtccgcaccgcctctaccctgccggtcatttccgggttgagacttaccaagcaaaggcaggaagtctatcaggttcttctggaacaaagggatcatcctacggccaatgaagtttaccagcgggtacgcaaaaaactccccagtatttccctggccaccgtttacaactgcctggaggctctggtaaaccacggcctggtcaatcaggtcaactttgaacgcagctcttcccgcttctgtcccaatctcgttgagcacggccacttccaggacacccggaccggacgcatttatgacatcaccatcaaggaaggcgtggacctgaaggaattcatcaacctgcccgacgacgtgtgcgtggaagaagcccaaatcaccctgagggggtccatcaccacgccgcagggctaactctctttcatcatcatgagtctggtcattaaaaatttgcacgccaatgtgcaaggcacggaaatacttaaaggcatcaatctggaaattcccaaaggagaggtgcatgcgatcatggggcccaacggttccgggaaaagcactttatccaaagtgctttgcggacatcccgactatgaggtaacggagggggaagcctggctggacggacagaacctgctggatatgagcattgacgagcgcagcagggcgggactcttcctggcattccagtatcccatggaagttcccggcgtttccaacgccaacttccttcgtgcggccatgcaggcccgcatgccccacggggaggaactggatgcggtcaccttctacaaaacgctctatgcaaaaatggaccagctcggcatggcccgcaaatttacgtcccgcgccgttaacgaaggtttttccggtggagagaaaaagcgcaatgaggtgctgcaaatgcttcttctggaccccctgtacgccattctggatgaaacggattccggcctggacatcgatgccctccgcattgtctcggaaggggtcaactccatgcggtcccccttccgcagcttcctggtcatcacccactacaaacgcctgctggactacatcaggccggatgtggtccacgtgctggctgacgggcggatcgtccggaccggaggcggagaactggtggacgaactggaaagcaggggatacgagttcctgaaagacacggaaacagcggaaaaggcgtaatgccgccatccggccatcaatcatgagcgatacacctgacatgccagagaacgggaacacacagaacctgtttgacttcgaccggagcaagggaaacttctccttcccggagcgccataaatttgatgccggatacggcctgacggaggccaccattgactacatctgcgacgtcaaggacgacccggaatgggtgcgccagttccgcaaaaacgcgcttgccgtttttgaaagcaagcccatgcccatccactgggcttctccggatattaaaaaaatagatttctcccaaatccgctactacctctccgacggagaacggcccaaacgaagctgggacgacgtgccggaggacgtcaagcgcaccttcgaacgcctgggcgtcccggaacaggaacgccagtttctggcgggcgtggaagcccagtacgactccgaatccgcctactccaacatgaaggaggaacttcgcagccagggcgttatcttcgtcaactccacggaaggcctgaaacaccatgaagacgtcttccgcccctggtttggaaaagtcattcccacgggagacaacaaattttccgccctgaacagcgcggtattttccggaggctcctttatttacgtgcccaaaggggttaaactgaaacatcctctccaggcctacttccgcatcaactcggaaaatttcgggcagttcgaacgaactctcatcattgcggacgaaggcgcggaactcatgtacatggaaggatgcacggcgccccagtttgaaacttccaccctccactccgccgttgtggagctggtcgcgctcaagggagcgaaaattcagtacgtcaccgtgcaaaactggtcctccaatgtcttcaacatggtcaccaaacgcggccttgccatggaagatgcggaaatccgctggatagactgcaacattggctccggcctcaccatgaaatacccggctgtggtgctcaagggcaggcgcgcgcgcggggaagtcatctccatcgccctggcaaacacgggccagcatcaagatacgggggccaaaatgatccatgcggcggacgacactacgtccaacatcgtttccaaatccatcagcattggcgaagggcgcgccagctaccggggccaggtaatcatgggcaaagggctcaagggttgcaaaaacaacacggaatgcgacgcccttcttctggcggccaacagccgtacggacacctaccccgccatcacggtaaaaggggatggaggcacggtgcagcatgaggcgtccgtctcccaggtctccgaagaaatgcttttttacatgcagcagcggggcattccgaaagctgcggcgatgtccctggccgtcaatggattcattaacgacctcgttcaggaattccccatggaatactctgtggagttgcgcaggctcattgatctggaaatggaagacagcatcggataaggagggaaataatggatcatttgcttaacgaagaacaattccccgcaggctttcttcccgcatggtttgaagcccggcgccgccatgccctggagcaggcggaacagcttccggaaccttcccgccatatggaatcctggcgtttcggcgcccccggcaacgaatccctggaacatgttgaagcggctcctcctgcagatccggaaaccttggcccccatcatcagggaacgtgcctccatgtcggaggccctccgcattgtctacgccaacggaatccccgtttccatcccggaagaactgccggaagggctttccgtaatggatatggaagactttgtgctgcaatgcccggacaccgcccggaaatacctggaaacagaaacggaaacgctcggttccgaaaaactgtcggcattggctacggccctccagcacaacgggctggttattatggcggacaggaaaatctccctccctctggaaatactccacttcatttccggagataacgtggccgtttttccctccacgctgctcattgcggaaaccggaagccgcctgcgtattctggaacgccacattagcgcagaccatggccgccaattctgcggagcgctccagcagtaccatctttcctccgcgtcatctgtcaaatacgcgctggttcaggaacttaacagccgttcccgtgccgtggagctttcccatatgatggcggatgattccgcggaaatggaacatctcgtcagccatcccggcgcggcatgggccaggcaggagacggtctgcatcctgaacggagacggcgcaggagtccgtctgctttccgccaaccatctcaaggaaaacaagaagctggaccagagaacctgccagaagcacctttatcgcggagcctccagcaacctgctttacgccaacgtgcttgacgacgaagccagcagcattttcagcggcatgatcctggtggcggaaggagcgcatgacaccagcgcctatcaaagcaaccgcaatctcattctcagccccagggcggaagccaactccattcccggcctggaaatcctggcggacagagtgcagtgttcgcacggttccgccacatcctccatttctccggaagaaatcttctacctgctttcacggggaattccggagcagacggcgcgcagcatgattgcccagggcttcctgaaacatgccttggaccaatttggcgatgagaccatacgtgccgcggtagaaagccttatcctgccctgaccgctatttcatgaaaacaaaaaaggcggagagaaggtcctccctatcctctctttcccgtcctggcattcatgcgccgctgcaagaaaactgtcacaagcagaaacagggccgttccccccatcatgctgtaataccattcacggtaaggcgtatggtactgaaggaggatttccgtctgctgctccgaatccgggacagaaacaagaatggaataacgctcagtactggataaagaaagctcttcccccttcccggtgcgggcgctccatcccctggaatagctctcaagcacagacagttcctttgttcctgacggcacggtgacatggattttattattcgttctccaatccggaacaacaggggaaaaatgattttcttccccttgggcgcggacgaaatagcgtccacggtacaagggattttccagcaagaagaaatttcccgtttcctgaaccagaatccacccgtcaaggcgtggttttccggctctggcatcgcacagcaaatgggaaatgccggccatggcataatctttcggatgataatgtccatccgacaaaggtctcaaatatttgggctgtaccgtttcatagcctgaagccaatcttattccatatgtggataaatgattggtacatagaaaatccaaatcattatgaggattgacgatgacaacggcgccatcccccacatgaccgcggaactcgggcatccatttcggttctttataaagacagccactttccggtttatcggaataggcaagccaagaagaagaaaacaccagctgctccccaaaggtacataacaccacaagtcccgcccaccacttcggataacggctggacatattcaggcgggaacaagcccagccccctatgccgaccaaaaaaattaatgagacattgcgccaatcccaaatcatcaactggtccaggagacgctcgcttctgaacaaataccaggaatgacggtattgttgctgagaagtcgttatgtttccgtcaataaagccatgcaattttaacagcaatggttcatggaagcactgaacggctaccgacacgccaagccatacgcacaagattccaattccccaccaggcaagtctgcgccagacaggaagagctggctgccgcccaaggtcaaataactgccatccggcaagccagctcattccaaaggccatcacaaccgtggaacgtgaataaagaaaagtagaaagaggagtgcatgaaataatgaaactgacaagaaaacagaacttggccgtcaacggcgcccgtcggttaaacaatgccagaacagccagcacgaaaacaactcctccaccaaacttgatatcgaacaaatcagcgccgatcactttgggaatactgattgtctgaggaatgccgaagagcgtcggcaccacagacgtgaccaaaaaaggaagattttccagtccccagacaaacggcaggcttttacagccttccatacgcggcagggtatccacaaaaacgtccaaggaaagcaacgccgccaaaaatccggagatcaaataaaaagaagatgatttcagaaaaactttccaggaccagcgatctgtccgtttccaccaatccgcaagaaacacgcacagcaccaaaagaaaaacaaagagacacgcttgcagatggccgcctctgaatccaagagcaataaaaagaatagagggaatatgcacccatttgttttttcttctcccttccaacagggaccagacaatcaacggagcccaaatcattccaccaagccaccggtcatatatccacataataaactgggaataaaaactgaaactcacggctcccagcaatacgtacggaacgggaattcccctagatttcagcagaaggatcatccccagccccgctataaaaaactgcatccagattcccgcatcccatgccgtccagaaaggaagaaaaccaaataaccaatgatgccaatcccccgggcttaacatggtgttttccggcagggaagtgccattgtgggtataagggttccatcccatatatccgtcactttgccaggactgctgcatcgcccagctataaggcaaatattgcgaagccccatccacgttatattggttatggacttcctccattggctgaaccgcgaaaggtctgaacaggcactccacacaatccaccggagctaaaacctttcccccgaacacggcaggagcaaaaaaaagcagtacaagcgcagcccaaatgattatcccccaccacaaggaaactttttctatttttttacaattcatttatcataaaatctggcattggccccatgcatacccgaatcaaatccctgcaaaggaacgaatgaattttcccacagaattgttaaaaaccggcatctatcgttctccttcaattcaggaatcaaatcaacgtatcggaacgcctttttttagcggatttacaatccgttacggataggaaacgggaaaagtcatcttgttctcagagaaagtgccgatcttcacagttattgaaacgaggctccgctttaacatgcaacggactccatgaaagaggatttgccaaaattctacttcaagcccggagatcgtagaaattttccgtgttcacgtcacaagggtgcgcccaggcagatttttgttctgcataaaatcccctgatacgtaaaggaacaacgttgcaagttcttttcccttagagttacagcttgactccggattgtaaatccgccctccccctcaaggaagagctgtcttattgaaaaacgcttcaccaggaactattttcattctgaatttccggttcagcatcttgagcaatgcatcaaaaaatctggcggggatgataagaaatagccttgccgccggttgatgacctgtccgacaaataaattgagggaacaaatactggtggttcgtcattccacataaagaaaaaagaaccaaaacaaacaggaacagcgtgaataaataagtaatccgaaataaaaggaaaccggcaggttcgccatgtgagcctctatccggcaaggaaagcgaaactgttttttgaaacaggggagagtgttcctccgttattattatcgtatggtcaccttttacaacatcactctctccgccgccttttccctgctgatgctgtctgtggcggaagcggcacggcccaatgtggtcctcatcaatgcggatgatcttggctgggcggaagtgggctgctacggccagcaaaaaattaaaaccccgaacattgacaggctggcatccgaaggacagcgatgggtttatttctattccggggctccggtttgttccccctcccgcaacgtgctgatgacgggcaagcatacgggcagctgcgacgtacaggatttgaaacgcgtggacgcaggcgaaaactggcgcgacctcaaaggagactggcctatcgaagaaaaaacctacactctgccggaagccatgaaaaaagccggttacgccacagcggtattcggtaaatggggcattggggatttcgattccaccggagcgccggacaaacacggcgtggacaggttctatggctacacagaccagaaagcctgccacacctactatcctccatacctctggaataacggaaagaaggaagttctcaacacttccctgacagccgccaccatcggacacggttcccagcccaaaggggaagttctggcggacacctaccgcgcggaacagcacagttccgatcttattgcggataaaatgctggaatttgtgagggaaaaggcccatggcaaacaaccgtttttcctgtattacgccccgctggaaccccatgtggctatgcagcctcttcaggaatggattgaccgctatccccgcgaatgggacaaatccccctaccgcggcaaccggggctatctgccccatccccgcccccgggccgcctatgcaggcatgatttcccagatggaccacaacgtgggacgcctgctggacacgctgaaagcctgcggcctggacaaaaacaccatcgtcatttttaccagtgacaacggcaccacccatgatgcaggaggggtggaccaccgttttttcaactccgtagccgatctcaaagggttgaaaggacagctttatgaaggcggcatacgtgtccccggcattatccgctggcctgggaaaatagctccgggaaaaaccattgcccagccggccttccatgcggacgtgatgcctacgctgtgcgctctgacgggggcggatgcaggttccccgctgggaacggacctctcccctgtccttctgggcaaaaaatccgccctgcatgacaggaaacccctggtttgggcaggaggaggctacggcggccaggtagccgtccgttttgactccaagaaagtcatccgccgcaacctgtttcccggtaaaaaaccggacaactgggaagtgtacgatatcgtgaaagaccccgcagagaaaaataatatcgccgcagaaaaccgtgacctgatcaacagagccatcgccattctggacagggaataccaacccgcccccggattccaggccctgcgttacagggccccggaacaatagccgaacaagaaagcgggaaagaaggccctacgatccgcctccgccgccattctgaccttgacgtgaatgacgccgggattagtctttcacgcatgagtttgacatcttccctcctttccagggttctcgggggcggttcctgctccagagaagaattgatagcccttagccgggaaccgctggaagagttgtgccaggcggccaacgccatccgggaacatttctgcgggaatatcttcgacctctgcaccatcatcaacggccgcagcggcaaatgttcggaaaactgcaaatactgcgcccagtccgcccactactccacggcagtggaggaatatccccttttaagtgatgaagccctcctggcgggggccaggtacaatgacgaacgcggcattctgcgttactccatcgtcacctccggcaagaggctgacggatgaagacgtggaccggctctgcgccagttaccggcacatcgccgaacattgcggcatctccctctgcgcctcccacggccttatttccaagaaacactgcgagcaattgaaagccgcgggcgtttcacgctaccacaataacctggaaacctcccgccgcaatttcccaaacgtttgcaccacccatacgtacgacgacaaactgcaaaccatcaaatgggcgctggaagccgggctggaagtttgcagcggcggcatcatggggcttggagagaccatggaggaccggatagacatgtacatggacattgccgcgctgggcatcaaatccatgcccgtcaactttctgacccccattcccggaacgccgtacgcggacatgactcctctgggagaggaagagcagctgcgcatcgtggccctggtgcggttcatcatgccggacggcttcgtccgcatcgccgccggaaggaacaccatgaaggaccacggcaggaaaatcttcatgtccggagcgaatgccgccatctccggagacatgctcaccaccgccggcgtcaccatccgggaagacctggccatgctggcggaactgggatatgaagtccgcatgaaataaaatccgccccacttccgcgacttttgccatgaaccactccgactggtcaaaaaaagatctggaatacatctggcatccctgttcccagatgaaggattacgaaacgctgcctcctatcgtgatcgaccacgggaaaggcgtcagcctgtatgatgtggacgggaaacgctatctggacgtggtcagctcctggtggtgcaacctgctgggccactcccaccccaaaatcaaccgcgccatcaaggaacagcttgattccctggagcatgtcatcttcgccaacttctcgcacaggccggctatcaccctgtgtgaagaactgatgaagaaaatcccgcgggggctctgcaaattcaatttctccgataacggttcggcatccatcgaatccgcgatgaaaatgagtttccaataccactaccagaccggaaaccgccagaaagtacgtttcatgtccctgagcgacgcctatcacggagaaaccctgggagccctctccgcaggaggcctggatctgtactcggaactttacaggcctcttctgctggacatcgtgcgcattcccgccccggattgctaccgctgccccaaggggaacaaacgcggctgctgccaggcggaatgcattgacgcggcacaggcggcctttgcgcgccatggagacgaatgcgccgccctgctggtggaacccctgctccagggctccgcgggcatgcggatgtatcctcccgcctatctggcaaaactgcgctccctgtgcgacgcctacaacgtgcacctcatcgcggatgaaatcgccaccggttttggccgtacggggagcatgttcgcctgtgaccaggccggcgtttccccggacatcatgtgcgtctccaaagggctcacgggcggttatatgcccatgtccatcaccatcaccacgcagaaaatttacgacgccttttatgcggactacagggaaggaaaagcgttcatgcacagccatacctattccggcaatccgctggggtgctccgccgctctcgccgtgctgaaggtcctggacgaggaacaaatcattccccgggcgcaggaaaaggcccctcttttccgacggatgattatggagaccctgggggatcatccccacgtgggggaaatacgcagcctgggactggtgaacgccattgaactggtggaaaacagggaaaccaaaaaaagctttccgtccgaacaacgaatgggataccggatttacagggaagcccttaaacggggactgctgctccgccccctgggcgacgtcctgtatttcaatccccccctcgtcatttctccggaggaaatggaggaagccgtatccatctgcgcttcctgcatccgcaaagtgctgggataaatgttcatccggcacaacaagacgaactgttctttcttgaagaagattgtgaaccaccaatatagtgcaattataatttgacaaaagccgggatgcggcagctacaatacagccgccgcgccccggttttcttatgaatgcagataccaaaatgttacgcaatagaacggcattttcgggagtaaaggtataaaccttattgtcttatttccccgcccggaaagccgcataaatcaaggtttttttatcccctatcgcgtcacattcgcccgctttttcctcatgtgctcggcattatgtctgcgggtgatcccgttgtaagcactcttgaattttgaagtatggtatcaacaggagctgcaaatacaatatttccgcaatgaagttgacaataaaggagaaatgcttatgggaccagtcaatttgttgaaagctaaaaatcgtgatgagttaaggcaatggcttgaacaaaatcataagactgaaaaagaatgttgggttgttgtaaaacgtggtaaaccaaaagagaataacacattttggtatattgacgcagtagaagaagctatgtgtttcggctggattgatagtacaacaaaaaaactcgataatggtatcactgcacaaaaactggctccccgcagaacaggaagcttatggtctgaactaaataaggaacgctgccgcaggatggaaaaattaggaaaaatgacggaagccggacgttctgctttacccgatatgtcatctgcaggttttatcatagataaagaaatcctaaaagcattacaaactgataacgaagtgtgggaaaattttcttaaatttccacctctttatcagagggtacgcatagatactatacagataaaaaagaaacaaccacaactttttcaaagcagattgcaaaagttaattaaaaatacaaaaaagggataatgtatggcgaatggaatgataatgggcgattatcagattattagctccggcaaccacgttttaaaacaaaagatgcaacttttcttcgggacaggggtttgtaaggataccttgcaatctaataccgccatgatacgcctcaccccgctccgcaaacgtccggcgctttccgcgctggtgcttctccttatgggctccggcttctgccaggctcaggaaatgcttaccgattccgcaagaaaggaagcttccgaatggctgaaggaagtcaaagccggctacctgaacaccagttcttcccgcatccagaaggccgtggccgcccttaccgcagccaccagcacggaaaacgccgccatgaaactttacgtggacgccatgaaggaccgtttcttaaaccccaccagcatgatgtcccgcatgctgaaccggggtggaggcttccggatgatgcgcatgccgggttccggagggaagggaggcaacagcagcaagcctgacagccccagcaccgccttctccaactggcgcaagcagaacacgggaaacaacgtggcccccggttttaaaaaggcccttcaaatccagtgcaaatggatgctgctttgcctgagaaaagcggatgcggaaaaaaacgagcgtgaactcaacgtttcctccagcgtcctctccatgctggatgaagtggccgccaacgccaaggacgtaggcgaacagcttcccatggtaggcggagccagcgaagtcatccgcacttacctgaacattggggactaccgttcggaaaccctgccggacaacctgatggacctcaacaccatctttgaccgcgtgctgctggttccctataaggagaaaaaagatgtggaaaatttccggaagctctggaacaaacgcatcgccttggaagcgactctgcttcaaaacaactccgccagcgataagaaaacggcggaagcggaaaaagccgctttcctgaccaaaaggcagtgggaccgggaaaaagcctgctttgaactcggtgaccaggtagcggcccttgaaaaaatgaaaagcctgatttccagcatcaaggaaccttctgaaaaacagcgcgccatccgcgacctggaatttctgcttcttaccccggcggaacaggcgaaactccgcgaagagcgcatgaacagacgcatgccgggcggcccgcgcttttaacaatcgtcgccaagccccaacctccctcctttcatcccccgttgcgtaacgcgcatcgggggatgttacattgcggagagtcacacttccttgacggaggcagcttccttcctgccgggctggaaccatgtcttgcgcaggcggtaaacgcgcacaccctggatattctcatccagatgccaggctgtgcgaacgccgtgctgctcccagatatggcggctgagcatccccatgaacttgctgtccatatcggaaacgtccccttgcggcgtgagacagacaatgtacacattatccctgcacaggttcagggaggactgccccgcccaccccatctccttcagtttccgctgtacgggtttcaacggaaaattccagccgcccagcgtgacaacgttcttccgggaacagctccaggccttgcggaaaacagactgccccggggccagatcgtcaatagtgccgccggacatctggacgcaaaacagggaatcgggctcccggtccacccgctcgcataacaggcgcccggcatccggggaaaaagactccagattagcctcccacacggcggcgcacgcctgggacaaagaaacggagaacgcgcaaaacatgggcacgccgcccgcaagagctcccttccccgtccagttgatgcggatgggacgatatttatccgaccacagcagacacagccctgcaatcaggaacgttggataaactacgcggaaatacaggcggtctatgctggacatatacagcagaatcagcaccagcagggagcctacgcagtacaccagggccggagaatccccgcgccggaaagaaacgcggcatgccagaccgaacaaaatccagcaagggagaagatccataacggaatcccatgaaaacagatgcaaggctttctctccacgggcccacgccctgggccagaattcacctccgtcccgcgccaacagaagcctttccagataatccgtgttgaatacatccatatcgcaattggtaaacatccggaccatcctgatatcgttggcgaacacgccgtacttttcacactggtaggcgctctcctgcctgatgggacacgtgtccgagagaagggcgcgggcctggttccatgccgccacgtcacatccctccagcacattccggtgggcgtatttattatattcattcagactgaaggacgaaatgagcacacaggccagagccagccagagacgactgagggcaaacagcttttccctggacggcctgagcccttccaggctgcctgccaacaggatggccccccagaaagcgtcgcacaccagggcggcatccagccggaccatgctgcccagcacgcacaggaatactcccgcgcaccaccccctccaggaagagccgtacttcaaacacgccagcacacctgtaaatcctgtcagaaaggcggcatggctgaattgcagagcggcgtaaaagcccggcatgatcagaagccacaccagcagcagaaccagcgtattgaaatcatatctgcgcgccttgcgggcatgcgccgtcagcatcgtgaaaatggccgctccgctggacaacgtggcaagcgccagaaacacaggccaaacggacaccccgccaaggacaggcgcaactttcaacagaagaccggtcaacaggggattgacgaaaatgacatgggcgtccgcataagagggatccccccatccgtcaagcacggacgcaatcaccagatcgtcattggactggtaagccacgcccacaaggctccaggccagaaccagaagcaacaggttgaaccatacgggatggagcagaggaaaaagcgatacccatctccaaatctgtttcaacataagcaaattccctgacgttccagactgttttccctgtccggggacgcatactaggaacggggaaaatgaaagtcaagagccgatccggatgaacaaaccggaggggctaaaaggctgcaaactcttccttaacggttcaggcagacgataatgcccgcgataatcatcgcgttgccgcccactttgcgcatggtgatcggttttccaaaaaaaatccggtcaaacaaaaggatatacacatatgcggagcattccagcatgttcaccgtaatcatcggcaggtgggacaggcagtaaaacgtcagcaggcagcagcccaaaaaaacggaatatgccgccatcgtggccggattcacgaaataggcaaggccggtcagccggtcattcatggcagactttttcaaaaccacctgtgtgcaggaggccagaaaaacggaaaacaggttcagcccaatataaaattcttcactcatgcgcctcctccgtggaaaccaaaataatccccccgatgaccagagccgctcccgccgccagcgtccaggaaagagcctcccccaggcaaagccatgccagcaggataccccagatgacaacggcggcacggttggcataagccacacccagattgaattttttcagcatgacctgccatcccgccgcataaattcccaacaggaacagcacgccggccagcagggcgaaccggcgccagtccgtccagccgtagggggcagccatgcgccccagcacggtattcagcgcgtaaacgataaacagcaggtgcagaatcaggtagttgatcatgaaagaaataaagagccgggaacaattcactcataccggcgcgccaccaccacggcgggcctatgcttggtttccttgtaaatcttggaaatgtaaatgccgataacgcccaggctcatcagaatcaagcctccgaccagccagatggaggccacggaagaggcccagccgggaggggctacattatacaggagctggcgcacaaccacccaggcgacatacagcatggctaccagggtgaccgccaggccaaagtaggaaatatacaccaacggcctggcgctgtaggaaaccacggaattcaccgccagcgccatttttttgcggaaagtgtaggtagttggagaagaggatgctttcttcaccctgcacggcacctgccggaaaccggcggaaacgcacagcccaaagaaaaaaggctcccggtcctggaatttcagcatctcccgcaggaaacgcgcgctcatcagccgcgccgtaaccatattcctggtaatctgctggtcggaaagcaaattaaacaatgtgtagaacaattctccggaaacggcttcaaacaagccgcccttcctcttctcctgcaccccgtacaccacatccgccccggtagaatccatctcacgggaaaaatcaaccagccactcgggagattcctccaaatcactgtcaatcaagaatacgcgctctccccgggcttcttcgcaggccacgtacatggccagatgatgaccgaagttgcgggataaatccaccacgcgcacccggccgtccttttcccgttccttcaacgcctgttccagaccgtcccttgggcagccgtcattcaccagcaccacctccgtgcgggaggggtcataacccgcctcaagcgcggcggcgaaactgcgggaacagaactccgccagataaccgcccgtacaatacacggtagccacaatggacaattgaacctgtggatcagtcataacgcttttgcatacatgagaacgcgtttcctttccccgcttttcacgcacacctcgtccttttccggaacacggacaaaacccatgcgctcatgaaaacgcacggaagccgcattgtcctccagaatccgggcatatagccgttccaggcccagctcccctgaggccagctccatcatcccggcatatgcggcggaagccgggcgcagttccctgaatgccctgtcgtaaagataaatgcctatctctccgcaacgcgtattccggtcaaaccagggcaggtaaaccagacccagcggaacctggtccgcataaatcacgcaggcgcgggcatcctccccgcggacgttcctttccagccacgcccggtgctgctcctcagttacctggtccaacaaaaaaaacgggctgaccttttcggaattgcgccacacgcgcaggcggctgcgcatggcctcatccacatcagacacgttaaccaggcaaattttcatcatgattcaactccctccagcccgaagccggcccgcaacacctcccggcagccttcttcccccaaatcgtaatacaaaggaagcctcagcaacgtatcgctggtacggtccgtatgaggcatggccccggcagaacgcccgaatctcatcccggcaggggaggaatggaggggaatgtagtggaacaccgctttaatcccgtgctccgccagcttgttgatcaagcgcgtgcgctcctccatggaacggagcagcacgtaatacatgtgggcgttatgcgtgcaatgctccggaacgcacggacgccgcagcaccccctgttcttccaatggagccagagcgcggtggtacatattccaccacttcaacctttccccgttgatttcctgcccgtgttccagctgggcatacaaataagcggcggtcatctctccgggcagataggaggaacctacgtccacccaggtgtatttatccacctgcccgcggaaaaacctggcacggttggtccctttttcccggataatctccgcgcgttccatcagggaggggtcattcaccagcagggctcctccctctccggaaatgacattcttggtctcgtggaaactgtaacagcccaaatggccgatagagccgagccgacgccctctgtagcaggaaccgacgccctgggcggcgtcttcaatcacatacaggcggtgcctctcggcaatttccatgattgcatccatttcacaagccacacccgcgtaatgaaccacgcaaatggcgcgggtgcggtccgtgatggccgcttctatcagcgtctcgtcaatattctgcgtatccggcctgatatccacgaatacgggaacgccgccgcgcagcacaaacgcgttcgccgtggagacgaacgtataggaaggcatgataatctcgtcgcccgggcggcagtcgatcaacagggccgccatctccagtgcggcggttccggaatgaaccagcagaacctttccggcgccggtgcgttccgcaagcagttcatggcattttttcgtgtaatagccgtctccgcataaatgggcgcgctggatggcgtcccggatataatccaattcgggaccgtgcaggtgaggttggttgaaaggaatctccatggcttcagaaaagaccggcccataacggacgcccggcgcaggcatgccgatcccgtgcgggaggcgttccccgcctcccgcacggggagaccctactatgaacggaggtctgaaaacaagcctagaccttgatgaaggtccggtttttgtacatgtaatacagcacgccccaaatcagggcataattgcagagataaaagacaaacctgtccgcatccccgaaacacccgctaaacccggtaaacaatacccgggagaaattgctcgtaggggggcacagagatacccatatgtacacgaaaatggcattgctccctattacggagaaaaagaatgtcagccagttcaatttcagcacatccgtcagcaggtagaacagggccagcagcaaatagcaccatcccgccgcccacaacaccatggaactggtgaacaaacgcttgattatcgggaaatccaggctccagacataccccagcgccaggcagcccgcgcccgaacataacagccacgccagctttttcccatgcccctgcacccgcttcagaatctggccgcccagcagaccgagcatggtcatggcgccaaaaccgaactgcgccagaatccatgcataattcgttccatcctgccagtttcccatcaggtatttatccagcagcagggccagatttctccccggttcaagcattcctgccgcacaggaacccaccgctgggtcagaaaaggaaacaaacttcatgaccagccagtacacagccagcagcccccccgttgccgctacctgccaccggacggacagatgaagaaggcaaatggccgcaatcaggtagccggaagcgatggcctggagcgtattgcagtacagggacattttggacggttcaaaactcagcagatttccctgcaccaccatgcccagcaaaaaaagcaccactacccgcctggcaactttcaggtaaatcttccacaggggttccgaaccgatgcgcctggaaaaggaaaacggcatggccgttcccacaataaataaaaagaggggcatcaccagatcccaagcggcgaatccctcccaagccacgtgcgtgctgtgcttcaccagccactcggggctccggtcgtaaaaaagattgatgccggccacaaccagagccaggcccccggtcaggaaaaacatgtcaaatccccgcagggcgtcaatggccgcaatcctctgcggcctcgtatcggaaagtgaactcatggcaatatcccaactacggcgttatgtacgccaatctttccaaagactttctttttctcaggctccgtaaataaacggctgtttccggaaaaacccatcctctgcggcaactccgtcatgatgcctttctccatattccctgccccgcatttcatgctatgctttccccgcaacatgaccatggggaacgaccaatccggcgaacgcgacagcttccggaatattgaaacttacgcccgcctgaaaatggatgaacttggtctggcagactggcaattcggctgggaccgggccaaaagaaggctgggcgtatgccgcctgctggaaaaaagcattacgatttccatccacttcgtccgcgccaacctggagacccctcatgaaatccgtgacacgattctgcatgagatcgcccacgccctggcatggacccgccacggagaacgcacccacggaccgcgatggaaacaaatttgcagggaaataggggctgtcccgtgtgcctccgccaaaccggacgccatccgcgtcaccacgtacaaatatctcctgcgtctgaaaacgacgggagaaatcgtcggcaaataccaccgccgcccctctttcgccaaatacctcaagcgcatggccctgaaaggccgccccgatacgctgggccagctggagctggcgccttatgaagaataacgtccacaaaagctgaaagaaacgagccgtttccggtattctccagcatcaacgatcatcccattccgggcatttccattttttacgtctgctcattatccggaacagcagaggaaacactcaaggtgcgctggcgtacgtaatcgtacaccttcgggtcgctgtctccggctgcccagactacccgcagaaagtcggcgggatgaatgtttccatggtcccggaagaaacggcggtcattctcacagcagtaaatgatgtcatcccccatggaaccgacgagcttggcccgcgccttggcaatcaggcgcggaaggtaggggagaccgcagagttcgtcgccgaaccccggcaaatcatacccgatcacaggtttcccctggtaaaactgcccgtgctggacagtcaggaagaagtcccggcgcgccgccgccatcagcagaaccgtggtgggggaaggttctcccgtgcgggcataggtttctacaaaatcaaacaattcccgcgtgcggcaaccgatggaagacagaaagataatttcctgatccgtaaagaagccgtccacattcctgtggccttcatggtagcgccccaccgcttcgcggaaaaggtcgtaaaatgtatcgttccaatcttcctccatcatcggcccgacgatttgtgtttgcgcttgaagttaagcatcatgatctgcttggtcagattggcttcaaaacgggcctgttcctcgcgggacatttccgaacgcgtcttgagcacctcctgcgcttcctgaatggcccgctccacgctgccttcatcaatctgggaggaattgatcgcgaggtcggttaccatgaggacctggtttccattgacctgcacaaagccggtgcctaccaccatgctttcctccgggccgtccatgggcttgtagcggagctcccccggttccagggaggtaatcagggccgtatgatgttccagcacgcccatctccccgaggctgccgggcagataaacgtactctacagtagcggtaaccgccacttcatccggggtaatgactttgaactccatgctcatggttcggaacggcgggaaaagggttatttggcttccttgagaacgtcatcaatgccgccgcgcatgaagaaggcgtcctccggaaccatatccagcttgccttccaggatttccttgaacccccggacggtttccgccacgggcacataggcgccgggaatgctggaaaagacttccgccacatggaacggctgggtcaggaagcgctgaatcttgcgggcgcggctcacgatgagcttgtcttcttccgaaagttcgtccatgcccagaatggcaatcatatcctgaaggtccttgtagcgctgcagcaccatctgcacgccacgagccacttcataatgctcattccccacaatttccggggccagggccttggatgtggaagacagcggctccaccgccgggaagagcccctgggccgccagagagcgttccagcaccaccgtggagtccaggtgggcgaaggttgtggccggggccgggtccgtcaagtcgtccgcaggaacatacacggcctgcatggatgtgatggaaccgtgcttggtggaagtgatgcgttcctgaagatccgccatttcctccgccaggttcggctggtaacccacggcggacggcgtgcggcccagcagggcggacacttccgaccccgcctgggagaaacggaaaatattgtcaatgaacagcagcacgtccttatgctcctcgtcacggaagtattccgccatcgtcagggcggacaaggccacgcgcagacgggcgccgggaggttcattcatctgtccgtacaccagcgccaccttggattcttccggtttttccaggttgatgaccccggactctatcatttcattgtacaggtcgttcccttcacgggtacgttcccctaccccggcaaagacggagaggccgctgcgcgccttggcaatgttgttaatcaactccatgatgagcacggttttgcctacccccgcacccccaaaggcgccgattttgccgcctttcaggaaggggcagataaggtcaatgaccttgatgcccgtttccagcacttccgtgctggtggattgttcgtccagcggcggagcgccgcggtggatgctcttcatgccggcgcaggagagttcgccgcgctcgtccacagcttcccccagcacattgaaaatacgtcccagcacgcactgccccacaggcacttcaatagggcgccccgtgtcgcgcaccggcatcccccgccgcagaccgtccgtagaactcatggccacggcgcggacccagccgtctccgatgtgctgctggacttccagaactagggtcttgcgcctgccgtcaacttcatagtccacttccagcgcattgagcaaggcgggaagcgtttctgcctgggagaagtccgcatcgaccacagcgccgatgatctgaacgagaatgcctgtgttattcatcatgggaaaaacttggtgttgaaatggagaagaaagaatgttctgtttgaaaggcgggtaaagaaagcggagccatgttattccatagcgcgcatggccgtggtaatttccagaagttcgttggtaatttgcgtctgacgcgccttgttgtagtccagggtgaggccgccgataatgtttttggcgttttccgtagcccccttcatggcgaccatgcgggcggaatgttcggatgcccgggcctccagcacaatctgaaccagtccgtggaaaacataaagaggcaggatggtatccaacagggcggcggggctgggttccagcaggaattgcttatgggcttccgctccgtccagggaagagcccccggccttcgccatgttcatcaggggttccggctcaatgggaagaagctggcgaaagacaggcttctgaaccattgtgttcacaaaaccggagaaagccacgaagacgcgcccatattcctccgccttgaacttttgcacgatgaaatcaaataccggctttagttccagcagagaaaggggatccgtcaggctccaggtggcctccaaccgttcattcaatttggcgagcgcagcattcagcttgcggccgatggtgatgtaatgggcgttttccggggcctgttcccggaccattttgatcaggttggcgttcaggcctccgcagaggccgcggtccgtattcaccagcagcaccagatccgcgccgccgtgggtttgcatcagggggctgttgctggtgtcaatttcatcctggagatggtagagcacttccgccagggcgcggatgtaggggcggcccttgacggcctggtcctgggcgcggcgcattttggcggaagccaccatctgcatcgccctggtgatttgggacgtgtttttgacggacttgatccggcgtctgatatctctcagattgcccatgtgtcagtactcccgtaatcgttagttccagctgagcttgaaggattcgatggcggctttaagccctgcgtctatttccggcgtcaggtctttttccttcaggatgctttccagcagatccggatgctgatcctgcatcaccgcttcccacgcgttctggcattccttgatcctgtccaccggaacatcgtcaaagtaccccttttgcatggcatacaagtcagcggcctccagccccagggatttgggctcatactggttctgcttaaagagctccacgatgcgctggccgcgagccagcttggccttcgtgctggggtccagatcagacccgaactgggcgaacgcctgcaattccgtaaattgggccaaatccagcttaatggagccggccaacttcttgataattttcgtctgggcggaagaacccacgcgggagacggaaatgcccacgttgatggctgggcgcaccccctggtagaacaggtccgtttccaggaatatctggccgtccgtgatggaaatgacgttcgtgggaatgtaggcggaaacgtcgcctgcctgcgtttcaataatgggaagagccgtcagggaaccgccgccgtgttccttgttgatgcgcgcggcgcgttccagcaggcggctgtgcaggtagaaaacgtcccccgggtacgcctcgcggccggagggacggcgcagaatcagggaaatctggcggtaggccacggcatgcttggaaaggtcgtcataaacgataagggcgtcttcccccttgtccataaagtattcccccatcgcgcagccggcgtagggcgccaggtacagcatggcggcgggatcggaggcggaagccgccacgacgatggaatatttcatggctcccgtttcctccagtttcgccaccaggcggctgatgttggcgcgcttctggccgatagccacgtaaatattgtagaggggctggtgatccggaagcttgccttcctccgccagacggttctgttccgcctgggcaatcatggtatccatggcaatggcggtcttcccggtggcacggtccccgatgatgagttcgcgctggccgcggccgatgggaatcatggcgtcaatgggaaggatgcccgtctggacgggcacggaaacggactggcgggagatgatgccggaggcgattttttccaccgggtaatacgcttccgcctcaatcggccctttgccgtcaataggttctcccagcgtgttcaccacccggcccagcagggagcggcccacgggcacggaaagaaggcgtccggaacacttgaccgtgtccccttccttcaacttggaatcatcccccagaatcacggcgccaacctcatgttcttccaggttcatcgccagccccatcaccccgccggggaactctatcatttcattgagcatgacgccgctcaatccttcaatcttggcgacgccgtcccccacggaacgaatgacgcccacgttttcctgactgacggaagccgtggctttttttatttctgcttcgagttcttgaagtatgttgctcatgggaaaaattcgttggttaattggaaagggtgcgggccatcgcagccaggcggtcgattctggaacgcacggaaccgtccttcacgtcgtcccctacctggatacggacacccgccaacagagacggttccacctcccagcggtagtagagggcgccgccatatctggcctccagtttggcctgaatcagggaacgttcctcttccgtgaggggcacggcgctttgaatagtggctgtacggcttttcaccgcatattccaccatgccggaaaaagctttcagcagagcggcataattgcggggcttgcgttccgcaattttccgggcgatcagacgcacgcggtcctccgccacggcattcccgtccatacagagccggaacagcctgcgggcggcattttgcgtgtcctttccgatcttcataaatatttcaggaatccaggctgtcgatcgcttcccggttgattctccgctggtcttcttccgtcagcatttttccggtaacctgggccgccgccagggccaccagctggccaaattgttcttttaacgcttcacgctctttctgctgttccagttccgcaagctggcgggccttttttatgatttcctcagccttccgggaggcttccgcttcctgttcttccaacaggcgggcggcggcagccttggcggcgtctattttttcctgtcccttttcccctgcttccaccagcatttcatgcgtctgttcctttacggaagccaactgccgctcgctttcctcacgcatttcctctccttcttcaatacgccggcgccttttttccagaacattctggatgggtttgaacgccagatagcgcaggatcaccaccatcagaatgaaagcgatcaggttggcaacaaaaggctcccaactcgttaccccgaagggagcaaaaggattccaggcttggtcagctatgagattcagcataagatgagcggtttgaacatgccggaaattttccggaccggcaggggacgggcgcgccgccccggagcggaaaagctccctccggggtcggaacttccgttttatttcacaaagatggagatcagggccacgccttcaatcagggccgccagcgtgatggcaatcaccataatgggggaggaagctccggggttgcgtccggtggcttccgcggcttttgcgccaatgaggccaatgccgaggccggcgccgatggtgacgaggccgaaacctacgttgccggacagttcggccagggaggtcattgcgataggatcaatcatgttattggtatggtttatgttttttgttgaacgttcccccacaggttgcccatggtccggaacggaaagctggcggtacggtttatgaggtttttccaggcggcaggcggtccggcacgggaagttccttctcctcatttttggaagcatggccgtgggcgtcatcgtcccccacctgaagtttcaggaaaatcgccgtcagaagcaggaaaaccagggcctgaatgaaccccaccagcagttcaatcgccagaaacggcaatacgcacagggagctgagcacgggcccgaacatgtgagccatggtgtcaataatcgtttccccggcgtaaatattgccgtaaagacgagcggccagcgcaatggggcgaatcgtgatgctcaggacatccaccagtcccacaaaaatgaagatgaacaccagcacgaatcccatgaaccccggcagtttccccttggggccgaacaggtgaataaagaagcctttcagcccctgctcccggatagaccagtaaagccacatcagcgcataaaaaatacccaggaacatcgtcacgttcatgtccgcattcgcgccgcggaacagcggcaccccttgataggtgatggttcctaccccgggaagaagccccatgtaattgctgaccagaataatggtgaaaatagttccgaagtaccagaagtacttgcgagtcaggcgcggccccagaagggactggacaaagttgtacaaagtctcaaaaaagtattccaccgcattctgtaaacgggaaggcaggatgcgcatggagcgggtggcggaccaaacgaccacccctatcagaagaaccgccagaaaaagcatcagcatcgagttggacaccgggagctcaatgcctccgggcagaggtatggaaaacaaatggggagcggcctgttccaatccgtgctccgctccttcctccgccgcacaggcgctgccgcccataatgccggacacggtcaatgccgccaaccacaggaactggaaaaatctgctcattgtctgtcttttaccattactcgtgccaactcctgtaaatactgaaaaagggaatccatgccctttatttgacggttttgattgtggactctcctctttattttggcaagcccaaaactcggcacgcacacaaattatatacatttgtacataatcttaaaagaaacctgaagaccgttacaacatcaacaaaatcttttctccatcaacaaaaaagcttccgggaatccatcccggaagcctgcaggaagaactgaaggggcgttacttggcggcggaaataatatggatgtggtacacgtctctgccgtccgcggccttgcgccccgtggcatgaattcccgcaacatcggaagtgattacatccagtgtttccacagcattccgaagctccctgctgctttccgccgcgctcttcagggcgtcacggaccggaaccaggttaagctgaaattcgagtggggctccctgtgccggagatttcacggattccctgaggacttccatgccgaaggccttcggcatactaatcgcccagcgggtatcggaaatgcttaccaccgggttcagatcggcgcccaaaggacactggtaatcgtaggtagtgatatccccgtccacagaagactggggagcgggcaactccgccattttaccctggctgaccagagtgacgacggttttggcggcattagccactttctgccaggcttctcccagggcagcgcggtttttcacttcatatgcagcggagaaacgcggcgccggcacattcttgagcatgggactgggagcgccctgcatgtccatcatgaatacgcctgaacccgtaaggccggaaagagcagttttataagccttccagagctcttcaatggtaggcctggccatctggatcataggggcggccatgcgcacctgatcgctcacatcatgcttcggattggaaatataggcattgccgtagtcccatacaatctgggcaatattaccgcacagggaacagcccatatccatcatctgcggattgaccgtgcaggaggaatacagcaccgtggacgcgccaggacgcacggcactcatggcggaaggagcgtccagcttgtaaaattcaagcggatatgtgcatgcttccacatgcaccccctgatcctgccacgagaagtaggaaacggccgtggcattccgggccagcttttcatacatgccaagcatgctggccttgatggaatccagcgccgtcatggaaggagccagatcggcaattttccaatcggcgcctatcgtctgcatcacatccttcaacccggtgaacatgcccttgtaataggccagatccatgttaataacccctttgacggaggctttgtctgcgaagagcagaccgtaggccggatactgggaccgggcatcggccatggaaaaatcaggacgagacagcacggagtcctggggggaagaggctatgcggacctgtttttcaggattggtggttataaagcctaccagggtatcctccacaaaagagacggctacatacagcctggattcatccagacgaacgagcgccgccttgaggcggtccatattttcctgggaaatgtccatctgcccctttgcctcctccagaagctcttccagcttcgcgcgcacctttttgcagtccacttccgccaccttgcaggccaggccattgtaggtcttttcgtacagggaaaccattccatgcagctccatatcctcctgaagattggcgtccttcaggaaagctttggcctgggccagggcttccggcgtcagtttggcggcaatcatcacgggcgccgtcgcagcctgggaagggcgtaaatccatcagctcagcccactgcgcaatcatctcgaccccctggccgcccatggcctccgcttccgcgccatcgtcatccccgcttccattctttactccctggaaaagcctgtaaacggataaaatttccttcatctggttcaggcccatcctggtaaaagaggactgcgcgctatccagccacggagcccattcggggcccaagccgatcatcgcgtcaatgacaggactgctgaaagaacatttccgctgcacgggttcgggagcgtcttctcccggaatggctatggattcatcggccacctccccggatgaacaggaactccaggttttaaccatgttcaaattctgaacgctcttcatgatgccggggatatcgtaaacccccgctaccacccccatatccttgggaaagagggcggctattccgaggcgttcggcacgctttgccaccagatcggaagcaacggaagtcaaaggatcaggcgaagcggcggaagtcaggccggccgtatcctggccggccttggcggaagatgatttatcatcgtcagagcaggcggcaagagcgcaggtcagcgccaaacagggtatggagtagaaataatgctttttcattatctttaaacgtggggtcatgatgtcatctgacaggaacgccgctccttgcggcaacagtctcatcagcgcaccgtcttcattatacaggcgttttcccgcgagacgcaagcacaatgcaaagcattaacgccactcagggcgcgcagggcgttgacgcatggagaacctttccgcgccgcccctttccgcatcttcccgggattttccgggaaccgcaaaaacgctccggatttccctgaaaaacggattaaaggggttccgccatgggaatatcatcctccggcaggggagactgcggcgcgggagcgtttacgggagtggagcggttgagatggcggggaatctgctggggcaacccgggaatgtaatcggagtctccccggcgcggcgtgaggggggccgcagaaggctcctccgacaacgggggcgccgacggcccggcatgccctgaggagccgcccaccggggttgccttgatttccgcatcggaagagtcatccagatcggcagggatttcatcagccttgatcggctccatcccttccggatcatacaacccggggggcaggttgtccggcacgacggcaggggccccgctccgttcccgaagagcggccgcggccgtttccggggtttcctccaccggttccgccaccggaatgtcgtccttgggcgggtcaataatagccttgatgtcttttttctccgtttcgaaaaactccttgacgatgggagcggcggcggctcccccgcccagccgttcgtgggcgcggccttcatacagcaccacataggcaaagcgcggattgtcgcagggcatgaaaccggcaaaccacgccagacgcttgtcttcccgttccggcccccattgggccgttcctgatttgccggcgatactggaataggacaggcgcgcacgcccccccgtaccggcttcaaccacttccctcatccccttgcgcacgctggacagagcacgctcataggcaggcagcgggcgctgaacttcctggggcttgggcgcgtaaacgacattggcgttgccgtcctgaatttgcttgatgagctggagtctgggcagatacccgtttgccacgccggacatcatgtgcgccacctggaggggcgtaaccagcagcgtcccctggccgatggacaaattggcggcatccccggacatgaaatcgcgcttgtaattgcgaatcatataatcactggtcggcaccaggccgggatcgtccggaatgggcaggccggtccgttcccccaggccgaaagcacgggccgtatccatcagggcttccgcacccagcttcaggcccatctggtacatgaacggattgttggacatcgccagggcgcggacacagttgatatcccccaggggagtcttgctccagtttttgaaaacgtggttgccgatcgtcacggaagccgggcagtaaacgagcgtattttccgtgattttgttgttcctcaaggcactggctaccgtcaggactttaaatgtggaagcgggaggataacggccctggaaagcacgggcgcccagaggaccggcaggatcgttgcgcagggcgtcgtaatccttctgggatatgtttggaatgaacatgttcgggtcataggacggcgtggacgccatcaccagaacttcacccgtcacgcaatccagcaccaccatggcgccgcgcctcttgccgcgggaaaggatgcgttccgcatccttctgccatttcaggttgagggtggtgacgacagctccgccgggcttggggcgtatttgcagttcatccagaattttattgccgtcttcatcaaacatcaaacgccatacgccgggcgttccggtcagatttttattgaattccttttccagccccgcacggccttccacctgctcccacagcgggtccatgtggttgatggggccggttggcagttttcccttggatcccacatagccgatgatatggccggcgatttccttctccggataggaacggatgtaaatgggcaacagctgaaggccgcgcacgcttttcactttatccttcagcttttccgcttcctccgcacgaatgacgttcgtgagcggaagaggcagccagcggcggtgctcataatgtttccagagctgttcgtcggaaaaagaccacgcctttccggcaatttttttggcctgttccaagcagttgcgcccgaattccactacgcgggaacggtcggggttttcaaaaatttcaaaccgcaaagccagctgataggctacggacgtcacggccagcggttccccgttgcggtccaggatggggccgcgcggcgcgggaatcagcaaagccatggtcctggcggaagggcgcgtgctggtgtgcgcttcccgcgcggcgtccagccgtcccccgccgagggaaggaatcagggacagggaatccaagccattctgttccttttccgtttccccgggcatctccggagcggcggccacgccttcccgttctccggaggccgtatcggaatcctttttcctgtctcccaggtcaaccgtttccacagcgtcatcctctccgcgctgctccaccgcagcccggccagcagccgctcccccccgagaagacgaacggcgcgtggaagcctggccccaggccgtatccgccgtccacgcggccaacccggccaacaataccagggaacgtatcagaacctttattttcatcagtttgcaggagtgtggcaaatataccgcaaggaatcaacgattattcgcgctcacgcttattcctgaacgatgacggctgttcccaggccgcatttgtcaaacaggatgcggcatgcctctaccggaacccggatgcacccatgggagttggcatcccggtacacggtgcccacatgcagccctatcccgccatgaatgcgcatccacagcggcattttggcgccgatgaatttaccgccgggcggcacgcgggaagaagaggtagcgtccgaattcacgcacaggccgcttgcgtcaaacacgctgccgtaagaccgggaacggtaatccgcatctttttggatgatggaaaacttgccgcgcggcgtttcatgggcggatttgcccgtgcaaacgggaaagttcatggccggcttgccgtcaacccacaacacgccccgctgatcattcagatgaatgacgattctgctgttccgcgtccgcgcctgctggatgcgttcgtcatgataccagatatcgcgcgtgaagcggtactgggggtccgcgacaaaagcttcataggaagacgcatacctgccatccttcatcaacggctttccgtgaggcgtcctgggggtagaggagcaagcggacaaaaacagggagacacacagaaaaaaaagaaaagcgggaagggtgtgcggcatgcggcctgctttaccttcttcccccgtggaaatcaagcacgattcccctccgttccttcatgtttggaggaatcctgatagaaactccttttttttccgtatgatgcttttaaatggcctattcctcttcccccccctcccgttctccccgcctgcactccctggacgccctgcgcgggctggacatgctcattatcctgggcctggacgccctggttctgctcctggcttccagaaatccggaaagcgcttttcttcaggaagccgcacgccagatgacgcatgcccgctgggaaggattgcacctgtacgacctggtattccccgttttcgtcttcatttccggcgtttccatgtccttttccctggggaaatacaccagcgggaacgcttcctccgtccccgggcttctccatctctggaaacgggctctcgtcctggcttttctggggctactggtcaatggaacgcttacctggacggaaagcatgcgttatgcctccgttctgggactgattggtttttcctgcgccattgcaggaacctgcatcctgctgtgccgccgaacgggagcggttgcctctgcggcggggttcaccctggccctcattaccctgctccagttcacctgcggcaacttcacgccggacggctccgtcaactcatgggtagacaggcactggctccccggtcgtctgcatgggggagtttttgacccggaaggcccgctctgcgtcgtttccgcctccgtcctgtgtctgggaggatggctggcagggaaatttttgaaggaaagccggctctctcccgtgcacctctgcgcggcaatggcaggggcaggccttctccttttctgcgccgccaggatgctggacggcctctaccccatcattaaaagcatgtggacaggcaccttcgtcctggccgccgccggcatctccctgacgctcctttccctgtttcatctggccgtcgatgtgtggaacaaagggaaatgggccctatgggcgtttcccctccgcgttatcggcatcaatgccctggccgcctacctcattaactctcttctcaacattcatgcacttaaccgacgcgtcttcagcggtatagcagattttttcacacctttccaacccgtcttcctggctgtgtccctgctggtgctgcaatggctcgtcttgtacttccttgacaggcgccgcacttccctcgccccaaaagcggccaagtaaccgggcggcggaactcccggccagggcggccggtgttctctgaaaaaacgaagttcccctgtgagacggccggccgacgttatttctttccctcaacgccctgaaaagagaaataaagcggaaacatcattttttgctcgtttcagggaaaagctctgccatcttttccgaaagaggcaaagcacgttccttccacaattcccccggggtcccctgccccattttccaaccctgtgatcattccatgaaagcaatcatgttcccggtccttgctttggcggccctgagcgcttggaccagcgccgcccaaccccggacatccgccattcctcccatatcgggcaaaaaggcgtatcggcttccgctcccgccctaccaggccttctgctggttttcagcggatcgcggccgctggcccggagacgggaaccgggttcttccctggttcggacggacatcccccggcaacctgctggacagcagaccgaatcccagcaccgccaaaccgggggaccatgccatgttcgccctgttccacctcaaagacggcaatttcatggccgtgctccccgtcgccgcccctgattccctcgcgtggctgaaacttgaaagggacgggacattctttgtggaagccggttcgctgggaacttcccccgccaaaccgcaggccgtcctggccgtcaccgccacggacaaggatatttaccgcgcctgttccgccgtatggaacaaggccctttccctcccttccatcaagggcagaactttgccccgggaaaagaaaatttatccggaaccgttcaagtacctcggctggtgcagctgggaacagtataaaaagaacatttcctccaagctgcttgaagaaacggccaaaaaactggaggcatcccccgtccccgtccggtggatgctggtggacgacggattccagacccaggaaaggcttcagctggtcagtttccaaccccggcaggaccaattcccccggggctggcagcccctgatgaaacacaaaagccccaaattgaaaaggatgggcctgtggcactgctattacggcctctggaacggcatccaccccaggcaccatctggatgacgagactgcccgcggtctggtccgtaccgccaaagggaaaatcctccccggtgacggccccggaggagccggagcgttttatacccccttcctgcaatccgtcaaagacgccggattcgacttcgtgaaaattgatgtgcaggcggaatacctgaagcatgcggacggctggacaacccggtccgccacaataccaggtgctcggaagccctggaacaggcctgcctgaaaacagggctcagcctggtcaactgcatggcgcagggtaccgtcaacattcagaacacgcgttacagcgcggtcacccggtgcagcattgactacaagctgggagatgaagccatggccaaatcccatatcctccagtcctacgccaataccctctggctgggacagaccgtgtggccggaccatgacatgttccattccacagaccccgcctgcgcccgcctcatggccgtatccaaagccgtctcaggcggccctgtctatctttcagacccggcagacaaacttaatccggaaaacatcatgcctctcgtctggtcggacggtcttctgctgcgcccgctggctcccgccgtgccccttccggattccgtctttccggatgctctgaacgagaaccgcctgtaccgggtaatcgcccctctgcccggtcaaagcgccgccgtggtggtgtacaacctcaaacatccttccccggcgaaaccggtacgggggaaaatttccctggaggattataaaagcgcggcggccctgctgaacggcaacgcggcggaagcgtatgcctctctcccgccggagggcatcgccgcctattccggagagggaggccgcgcgctgactccggcacagccggatctggacgtagagctgacgggattcaaggaccgcctgttcatcatggcccctatcgtccaaggctgggccgtcattggcagaagggacaaatttctttctccctgcgccctggattccgctcccgggtacagggaggacagcctccgcttccgcgtgaaggaatccgggccggtcgtcatctggcggggaaaaggcccggtcaaagcggggaacacccccgtcagaaatctggggaacgggttttatgaattgcaattccccgtctccaaccgccccctggacgttactgtaacaacggaataattccgcacatttcctctcatttttccctgcttcattttccatgaacccgctgtatcccctccttgctttctccatgttgctcccgatctgccggcattccatggcctccgacgcggtcccgactgccattcctgcgccgaaacctgagactcccaggcaggcgatagaacaattcctgggtcttaccgccatctggatgctggaaatggaatggacccacgcctatgccaataaaacgcccaaggcggaggatttccggaatgccatgctggcggcgggccttcagcaatgccccgcggactttcaggaagcatggctgcggcaaacggccaggccgggacgcaattatgcggctcccgtcctgcgcaagtacggcgtcagcctgaaagacctcagggaaaggctccagggcaaactgttcaaaatcaaccctcgggtgcatccacccatccccctttacgacgaaggggaacaaattccacgcatggacccgcgcacatgcggagaccccaaggctatcctggaagccctggccgccctgcgcgcccaggtcatgggcctcaccccggcccagctgtcccaagccagacagtccattgaacgagtcatgctggaattcacgctggcctacatggaaaccgccatctgcatggatactgcgggcatccgggaaagccaggtcagggaactgttcgcccccatcagaacagaaggatgcccggaagacttccggcgcgcctggcagcacgatctgcctttctttctcaaaggccgcttcacggggccggagctgactctctccaccgtctgcaaaaaatacggagccaacgagcaggaactctttctcaaggtgcgacgaaaaatgaaggaatgggatatccagccgcctacgccgcagacgcaggacgccttccgccgggacatgcgggaaatccgggaaaacatgctgggaggcagatagaaaacagcctttccgcatgcagcgccttccgggaaccttcccggatatcaggccaaggtcaccccagcagcccggcatccattccttcgttatattcccaaattccctgctccaccataaacgcgctccagctattgagcagttgttcaaaataggcggcattcacattgaaatggtaaaatgtgtggtccgccacgtccagaagttcaaatcgggaacggttcttcttttttctccacagctccgccagcctttcgctgttgcgccacggcagcagcctgtcccttcctccatgactcgcaaacaggggaggaagccccctctgcacgcgccgcagggggttgacggcatccctctggtccggaggcatcatgccgcccagcttaaaagcggactgcgccgtcaggtcgcacacgcctcggaacagggccacggcggcggggccaggaggaaggggagcctttttgcggaacagagaccagcgggcggggtggtcaggaagggccacatgcagggccatcagccctccggcatcacttcccgccacagtaatgcgagccgggtccagccccagcagtgcggcgttcccatgcacccaggcccaggcttcccggccctcttccagaatgtccatcggctccacttcataatcgccgcgcgtgcggaacatggggataatgcctgcaataccctgctgggcaagatgaagcgcccacggcacaaaatcccccaggctcttgcccacccacatgccgccgtggaaaaagagcacggaaggagcggcggcttccgcccggtggccggggggaaaaaagacgtacgccatcagctcctccccgtctgaaaaccgcctccacacaaagccgggctgttcccgcaacagtttcctgtaccgggcttccgccaaatgatcggcttctgtgaacaattccataagaacggcttcatgatgcaattgtgttgcactccgcgcaagtttgatgtctaaataatcgtgtaatgactttccgttccattttctccctggcctgctgcgccgcagcccttctttctcccgcttccgcagctccccgccccggagacgccaaactgagagacgacctggacgtggcttacaatacatggcgtctgcatctgctgcgcggcaattatgacggctggagagccacaacctccgcctaccgccaggtgaaagtgcgcaatctggccgtttcggaaaaacgcccctttcccgcctccctgttccggcagcccatggctccccccgcgctcgctccgctgatgtacgtaggttccgtcgtaaacggccccacggccgcagccacctactacggcaaggtggatctggggctgggccaggaacccactgattcgaacgccctggtgctgctgttcacccatgaaaacggcaaatggaaatatgaccaggcgcgctttttcaacctcacccgcctgcccgccgtcaaagaacgcctcaaacgcggagacgcctccgtgctgatggagcaggacgggttccagccccttgggaaaattcccgccgtgccgcctgtctgcccgccgcccaaatacatcgcaaaaattctggtggactgccccggacgcaccgtccaggcgaacgtaaacaatatttccctgcatgaatttgacaacacccgcctggcggaagtcatttccggaggactgagggacggaaccaattcactcacactgaacttttccgacagcccaaacggcaaaaaaggcgccgtactcgtggaagtgtacatcatgccggaaatcccgggccacctgcccgccagggctttttcctacttcgtccccccccaggcgcaccccaaaagcggccctgtgctgattaacgtcactccggaattgctgaagaccatggagccgaagaattcttccccgaaggcagccgccggcaaataaaatcgtcattcttcaacgtttccgttgcgggcccggtcataccgccatatgacaactcaacctcaagtcagcagctccgcggtatccggcaactcatggtggatgggtatccttggcgtcatcgagctatttcttggcttcatcgccctggcctctccctggatcgtcggagccagcttcatttgggtaatcggcatcatgctgatggttctggccgtcgtccggctgatccaggtcttcaccgtcccttcctcccgtgggtggaacctggtgacggccatcctgtacggcatcgccggctggtttctgttccgggaccccaatatttccctggctatcaccacgctcatcatcgggtggggcctggttattgccgccgtatttcagggggccatctggcttcaaacccgttccctgcccgccagcgggtggcggctgttcaacgtgatcatcacgctgatcctgggcctcatggtcatcttcggctggcctgaatccacggcctggttcgtaggtactctgattgcagtggaactgatcttctccgggtggacgctgctcctttatgcattcagcggcaattccgcccgccgttaatcccaatgacgacaatgaccctcacccaggaagaaaccgaacggtacgccaggcatctttcccttccggaactgggagaacagggccaatacaaactcaaacgggcgcatgtcgccctgacgggcctcggggggcttggctccccggcggccctttatcttgctgccgcaggcgtggggcgcctgaccctgattgacccggacgaggtgtgtctttccaacctccagcggcaaatcctgcacgccacggatgcggcgggcacggctaaaaccgccagcgccgccagacgcctgtacgccctaaacccctccgtacgcatcaacacggtccacaggcgccttacgccggaaaatgccgtttccctgctggaagggtgcgacctggtcctggacgcttcagacaattacgcggcacgcttcgccatggcggatgccgcctgcaccctgcgcattccgctggtgtacggcgccgtgaagggctttatcgggcaggtggccgttttcgccccccatcagggaaccgcctgttaccgctgcctcttcccggcagatacgcccatgcaggaaaaagacaccgcctccgccgcaggcattctgggtgcgcatgcgggcatcatcggttgcatccaggccatggaagccctgaaatatcttgcgggcattccctctccgctggtgggcgccatgctctctgcggacacgcggcgcatgcgcttcaccaccatccctctggcgcctaatcccgcgtgcagatgccggactaacgcggggtgcggagccgcaatgaaaaattgacggcgtcggcggcatctggcatcatctccggcaggtatgaatcatttaacacgcgccaaatccgtttttgaaatggagattgaagaactgcgcggcgtcctgtcccggctggacgacaatttcaacaaggctgtggacctcatgtcccaggctctggaccgcggcaacaagatcgtcattgtaggcgtaggcaaatccggcaacatcggggccaaaatcgtcgctaccctgaactctacgggaacgcccaccgttttgctggattccctgaacgccctgcacggggatctgggcatcgtccaggacggggacgtctgcattgccatgtctttctccggagaaacctcggagctgctgaccctgctccccttcatcaaacgttttgaattgcccatcatttccatgacgggcaacacgggctcatccctggccaaatactcggatatcgttctggacacaggcgtttcccgggaagcctgcccgctgaacctggcccctacttccagcaccacggccatgctcgtcatgggagacgccctcgccatggccctggtggaagcgcgccacttcaccgcgcgggacttcgccaaacgccaccccggcggttcgctggggcgtgccctgctcacccgggtgagcgatatcatgcgccgtggagaagaaatggccatgcttccggaaaccgcctccgtgaacgactgcctgaaggcgatgaccacagcccatgccggcgcctgcgtcctgctgacggaggaccgcaagctggccggcatcttcacccacggagactttgtccgggcatacggggcgaaccctctcatcggagaacagcccgtcagcggattcatgacccgcaatcccatttatgtcatggaagacgacctggctgctgaagcggcgaaggccgtgagcaaccgccgtatcgacgacctggtggtgctcaatgcggaaatgacccccgtgggcatcattgacctccaggacctcgccaggctgaaactggtttaagccctacttctcccactcctttcaggcatccgtgattcaaaagtaacaaatcaatcacgggtgcctttttcattgaacggaagcttccgtttccacaatcttagttccataaacatgttcctgaaattcaccatctccctgcttgcctgcacctggggtttttcctgcgcacaggacatctccggcccggaggaagattccaatgctcccgctgcggaggaggccccgcgggaagtccctcttccggacgggaaaacggttcccaaatttgaacccctggatgagcaccgcatcaaaatcggcaatgtgattgtcaaccataaggagcgcaccgtcagttttcaggctcaggtcaacatgaaggaaggaattctggaatacgtctgctgcatgcccaacggcaagctgcatgaatccctgctggtgacggaggcggatcccctgcatatcagcctgggaatgacgctgctcaaattccgccgctttgaaaaattcttcccggtgcgtgatgaaaattttgaatggcttcccttcacggaacccaagccggaggactatgcagactcctacgtgcagattgtcatgacctatacggaaaacggcagagaacagaagagcgatttttccgacatcgtcgtgaactcacaaacacggaagggcctgaatcccaacgactggctttacaccaattccttcttttacgagggcgcctaccaggccagcctgagcggagaagtaatctccatcttcgccagccgaacctcccccatcaattacatcggagacttccatgacggcgtcaacgatacaggctggatcgtcaaccccaaaaaaaacctgcctcttggcacaaacgtcactgtcaccatttcccagaaaccggttcaacccaagcaatagcatcctatgttcaaatccgtactttcactaacgctggccgccgcactgggcacagcctccttcggacagaccaccctgacggccgttcccggagaagcggcagccgccaaatacgcctccattagccaggaaattctgcgcgccattgaaaaagggaacgaatacctgaaaagcaaacaaaatccggaaggttactgggcccagccgtcctaccctgccctgacagccctggcggtcaccgcctacatgcgggaccccgccaaccaggggaaacccgtcccggaatacatccggaaggggtatgacttcatcctgaaatcccagaaggaagacggctccattttcaaccgcggcatgtcctcctacaatactgccgtgtgcatgatggccctgctggccgccaacaaggaggaatatgcccccgccattctcaagggccgcgcctaccttatcaagcagcagaaccactttgccccggacaacccttataacggaggcatcggctacggggataaaaaagcccctcccattgcagacctttccaacacctccctggcactggaagccatttactactcccagaagctcgccaaggacggcaaatacggggaacagccggatctggactggaacgccgccacggaatttatcaaccgctgccagcagaacccggccgtcaacaaggaaccgtgggtctccagtgacaaatcccagctcggaggcttcgtgtaccgcccgggcgtcgccagcgccagggacagcaaaagcgccgcattcgacaaagcggaaccgcccaaggcctacggcagcatgacatacgcgggcatgcaatccctcatttacgccaatgtggacaagaacgacccccgcgtcaagctggccctcaaatggctggaaaacagctacaacctggatgaaaaccccggcatgggcgtccagggcctgtactactactaccaggccatgtccaaggcgctcagcgccatgggaatagacaccctgacgctggaagacggccgcaaggtggactggcgggacgaactggccaacaagctcatctccatccagaaaagcgacggctcctgggtaaacaccaacaaccgctggtgggaggcggatcccgtcctggtgacctcctactgcgtgctggcgctggaacagctctaccactccattccccggtaacggactaccatgctgatttcccgggccggaaggggaggcaatgacctccttttccggccttttccgtacccggaaatgaacgccccatgaaatagaagggtcttttcttcaatacttcaaattcatggacaccattgattccattaccatgattgcagcggcatggggcctgctggttctccggctgacgctggcttttatcctgtggccgcacgggacccagaaagtgctgggctggtttgggggcgcgggctgggagggcacctaccgggccttcacggaaaaaatgggcattccccccttcctggccaaggtggccatgctgacggaatttttcgcccctatctgtctggcgctgggcgtattcaccagaatagcggctctcagcgttatcatcctcatggccgtagccatgactaaacatgttaaaaacggctacttctccaactggtccggggaaaaaaacggggaaggagtggaattccacctgctctatgccggctccgccctggcgctgcttttgaccggtcccggcccgtggtccgtggatgcctggtgcatggatatcatgcacgccatcttcggctgacgaaggcaggtcataccctgccgggcataggacgcactttccgattctcaaatcctctgtattctggtatttatagggaggctttcttttgccttgttaacccttcccgccatgaccagccataaacgcttgaaactccggcagtgcaccaactgcgaatgcgtcattaacggagtatgggaatggatggaggaatgcgcccgcgctgcggctgaggaagaacccgccatgcgcggcattctggacgacgtctgcctgtcccgcaattccctggctacttccatctcggcgcggctggcccgcaagctctcccgccgtgacatgccgcgggagctgattgagccccttatccgggaagcgctggcggaagaccagaacatcctcagtcaaatagcccaggacctgatcgccatcgtggaccgggatcccgcctgccgtacgccgctggaacccctgcttttttacaaggggttccacgccatcaccacgtaccgcatctcccactggctgtggcagcatgaccggacgatcatggcccttcagttccagagcctggccagtgaagtattcgcggtggacatccatccggcggccaccatcggctgcggcatcctgctggaccacgccaccagtttcgtggtaggggaaaccgccatcatccgggacaacgtctccatcctgcatgaagtcacgctgggcggcacgggcaaggaagaaggggatcgccaccccattgtggaatccggagttcttatcggcgcgggagctaaaatactggggcgcgtcaccatcggcgcctgcgccaaaatcgcagccagctccgtcgttctggaaaatgtccccccccataccacggtagcgggcgtacccgccgttatcgtcaacgattccattccggacaatcccgcgctggacatgaaccagcgcctttgcaactgatagataacagattagaaatccgtcacttacagcagaaaacgaattaaatacgcaactccgcaaacatcagcgggaaaggtaaattctgaaaagaccagacataatataatagtttcaacctcaatgcattgaaattctcaatgcgcttattttgaacattttgagttgagaatgaattcccaatccgcatattatatgggatatgcgtttaagattacccctctctctaaggtctgctttgcttgcgtgcagtgtcctgtttacaaccgtggcatccgcctccgtttcagacggaaacctcggcaacgtcatgtacataggggactccatcacccatggcgtcaacagcggctcgtggcgctgggccatgcataaaattttcacggataacggcgtcagctatactgaaaaaggcattatgaccggtaatttcagcggaggcgtggccgccggaacctcttacggtggtaagattttccagaatatccattcctctgcggcttccgcgagaacttatgaaatcgccgggagagcgaacggcagcaactacggacgatttgacggatccaacatcaaaaactggctgggcctgagcacggaaaagaccaagggagggtcctatgcaggacagacttttaccggagccaataaaccggacacgtttttcctgctctccgggaccaacgatctcctttccgacggcgataataattcactgttctatcgtctggatggagttacctcccttttgctgggagacatggattccatcgtctcttccatccgtaccgccaacagccaagcaagcattttagtgatgaccattccctgctggacgcaacattccaacgggaacctggctgaaacgcaccaggccgtagcctcctacaacgaatccctgaaggaatgggggacgaataacgccgccaatggcgtcaaggtcatcgacatcaacgcgggcatcatcgatgccgcctcctccacgccgttctacggggttcgctccatgttcaacaaccctacggcggacggcctgcacccgaatgcccaaggcgatctcctgatggcaggcaacctggccaaaggcatgggctatgccgggcggtcagccgggcaagaaaggaaagccacccatgagctggaggtcaacttcggacaaaatccgtccatcacccagcagacgctggaggccaacggcttcaccgccaataatgtttccatctccaacaatacagtcaacttcaacaaatccggcagcagcaccctgacctataactggggagccgcccagggacagaacaagggctacacggtagatttcaccctgcgcctgggcaacggggccacggacggctgggacaccacaaacaacttctccctgaatctgggcaacggaacgctgaacattaatgaagcgtatatccaatggggcagcaccatcctttattccaaagacatgtccgccaatgcggacgccatccgcatagcctacgtggcgggagacagcgccaacggcctggacgcgggctattacatctggctgggggatgttctcatcggggaagcgcagacggcagcggggggaagttcttccggcctcacgttcagctattccggcacgctggacgccatcctgtccaatctggctttggacggttccctttcctacgccccctctaccaccggcatcactggcccagaatctctttatctggcaaatggcgcgtctccctccactctcaaaccgggcatgattgaatggactgcgggaaccgccgccaccgccgtagccactgccggaaccaatgccacgtataatgtccgtaacacaaccaattccaacattgccagcattacgggaacgggaagcaccaaattcatttacgccaataacggcgcttacggcagcgcgggtaaccgtcaggacctgtgggtgacgctgggagcgggaaccagcagcgccaacggctggataggcggccatacaacgggagacctgtacggtgacatccacctgcgcctggcggaaggggccatcggcaaatccacggtattcggcgttgttaacgccggaaccgttcacggggacatttacctggaattctcctcatccaccggggtttacgatacttccttcaccaccggagaagcggaccgcacctccgtggcgggctcctatgcctccgccgtgaacggggacatcaccatggtgttcaatgacggcgtattctcccaccgcattttcggcggcttttacacgggaaataaaaccatctccggctccgcctcccttttcatcaatggcggaacgttcatgaatgaaatttacgccgggaacaagacggacggcaccatttcccggggaaccagcctgaccgtcacgggcacggacgccattctgggcaaggctgacggggataactggacgtggacacttctgtgcggaggcaataaaaccagcggcaccatcaacggaggcaccacgatcaccctgaaagatatcgccgccactaccggagccggaaccgaacatcagttcgacaaatacgccggcatcatcgacggcaagggagccgggacggtgaacggggagaagaagctcgtctttgacaactacgccgccagcttcctgggaacgctccagaattttgacaaagtacaaattaccgggaattcggatctctcgctggacaaatccctgggaaataccgtcacctccctgtccgtgaacgcaggttccaccctccggttcaaccgggaccaggacgccacgctggacatcactaacaacggcacaatccgcacctcgcacaacctgaccctcaaatccgcagacaccggaaccgggacctatcaggtggaaggaggaacgctggacctggccgggcaggccgtctccgggaaaatatccctctccgcgggggcgctctccaatacggcgggactgggagccgggagcgtttccgtctccggcatcaccgggaacgtcaacctgggcggactggacggcagcaagctgagctccattaacatgggcagcggtacaggaatcatttccggtctgacgggccatgcggacctgtccggttccgacacgcaattgaggctttccgccgccaacatgggcgcggacggcacgggaatcatccagttcaatgacgcggacaatgccagcttgacgctgggcaacctgaccctgacgctgacggcggatgccgtggcgctcctcgccgctccgggggactactctttccacgtcaccaacgccgccctgcatgcggataccaactatatcaccctgagcgaatacaacggcatggcgtgggacattacccggacggaaggcggccaggtaatcatctccttcggccagttggacgccatggtcattaacaagggagcttccaaaaacgtcacctccgccagcacgctgggggcaacccccagcgtcaccaacaacggaacgctgaacatcgacctgtccgcggcaactgcgccggaagacaaaacaaccaccatccgctatctggccggtacggaggccgatgccgtcgtgaacacgggaacggacagcaacgtgatcatcacgcttctgaatgaaacctccgaagagccggacaaaacgggcaacaccgcctatgcgggctccattgaaggagcagcgcagctcgtcaaggacggggaacagaggctgaccgttgacggcagggtgaccgcctccgctctggacgtgcgacagggagaactcgtgctccagaacacgaaggaaagttccatcatctccggcgccctgaacgtggaacaggatgccgcgctgacgctgaacgctgccgccctgtccgccgggaatctggcgggttacggttccatcgccctgaacgggggcgccctgctcaccatcgccagagacactctttcagacctgacgctccacgcaagcgtcaccggctccggcaccctgaaactggacaattgcaacctgattctggagacggacagaaacctgggcgaagacgtgctgctccatctggggggcggcagcctgcgcctgcaggacggctccacaatcgcactggaagggctccaccaggagcaggagaacggcgcgctccacctgggggctgacggacgtctggaactggcctccaacgacgggaaaacctactccttcaaaggggatatcaccggcacgggagccattacccaccggggcgaaggcacgcagatcatcctttcctccggcaacgcaggcgtggacgtcagccatacccggaccggcggtcatctcgttctgggagacaaggacctggcagcaaacggcctcatgacctacagggatattttcatcggcagcaacacccgggacgcctctgacctggacgccacggcagacctctccctgatgaataataccacggccaactcactttccatcgcctccaacggcaaactgtacctgggcggtaatcccaaccagagggccgttcagctcgtgttgaccggcaacaacggcggcgtggcggccactctggcctccggagcttccctgaacctcaccgtcaatacggaaacgctgaccaatagcgcggacaacgcctgggccgccttgaaggcggaacacggctccatccgcatcaacggaacggctccatccattaacgtcaacatttacggcctgggcgccgccggagactgggccatcctgccggaattcaccgttaacgccttctatgcggaaaacggactggtcacggcggacggggaaacctggacggaggacatggtgaacctgacctatgccggcttcgccaaccttgtctatgacatcagcaagaaactctccgacgacggcaagctgttccaggtccacttcaccaagcagggagacagcccgctgaaagacttcgcctccacgggcaaccagcagggcgcggcggacagtctgtgggccgtcacctcctcaccggaaaacatcactccggacatgatggaattccttaacgccatgggcaacgcccaggccatggggaatgcggaagctatccggtcagccctttcctcctatgcgggcagcggcattaccgccctgcattccgcccagaagggagccctccgggaccaggtgcttcacctgcgcaaccgcctctcccagatgggagtctccccgcagtacattcacgatgacctgcccggcttcaacgcctggattgaaggggaaggcggctaccgcaggctggatgaccggacggacgaatcaggctataagctcagcacctggggcggcaccttcggctttgacgtaacgtgcagcgacagcttcgtatggggggcggccttctccgccagctacggcgacctggacgcctacatggcgaacggagacctggactcctattacggcaatctgttcttccgcatccagtcgggccgctgggcgcacaacatcatcctcacctgcggatggaacgacgcttccctggaccgcaccgcgggaatccccggagccggcatgtacaccatgcacggcagcaccagcggcagcagctacggcgccttctatgaaggcacgtatgacctgtacctgaatgagaacaacacttccgcgctccagcctctagtgaatgcctccgtgtacaggagccggatggacggctttacggaatccggcggcctgggcatgaacgtggatgacatggactccaccttcggaaccgtgggactgggcgcaaggctccgcggagaactgtccgccaacctgacgggccgcgcctccctgggtgaactgcgggtgcaggttgtccagcttctgggcgaccgggacaccgcagccgtcctggcacccgccggcatacccggcgcagggttccgcgtaaacggagccagggaaggagccaccggcgtgcaggtcggagccggaatcaccattccggtgggttataccggctccgtctttgcagacgtcaatgcggactttcgcagccgcgccaacagcttcaacggaagcatcggctacaggctgaccttctgaccgacttcttcaggagtatatatcaacggaagcatcgcggccatgccgcggtgctttcttgtttacggcgggcctcctgctcaggcacggcctttccgcggaactcgggacgggtccttcatctgcccgtctccttcaataacatacttgtaggaagtaagttcccgcaaagccattggcccccgggcatgaaatttgtccgtaccgatgcctatttccgccccgaagccgaattcctccccgtcgctgaaccgcgtggaacaattatggtaaacgcacgcgctgtccacccggttcataaaataatcgcgcgcccgttcatcctccgtaatgatggaatcactgtggtgggagccgtaatggttaatgtgctccacggcatcacggacgccgtccaccactttcacggaaagaatcaggtcttcatattccgtggaccaatcctcttcttccgccggaatggcttccggaccaaaaaacgggcggcttcgctcacacacgcggcattccacgccgcgcaggcgcatgcgttccgccgccatcggcaggaaccgttctgccgcggcagcgtccaccagcagggtttccgccgcattgcatacgccgggcctctgcgttttggcgtcatccagcacgttcacggccatctctaaatccgccgccgcatccacatacacatggcaaacgccgtccagatgcttcagcacgggaaccctggcgtactccgtcacggcgcggatcagtccctttccccccctgggaataatcacgttcaggaaagaatccagcccgcacaactgccgcacctcatcacggctgccggaatccagaagctgcacggcgtccgcggaaacggcggactccttcagcgcggcgcgcagaacctccgccagcgcccggttggtccgcagagactcgcttccgccgcgcagaataacggcattcccggacttcaggcacagggcggcggcatcgcaggtgacggtgccgcggctctcgtaaataaaaccgatgacccccaagggaacgcgcacctggcggatatgcaacccgttggggcgcgtccattcccggatgcattcgcccacgggatcagggagagccgccacctgttccatgccgcgggccatgtgctccacacgctccggcgtcagaagcagcctgtccagaaacgcggcattgtggccgcctttccgggcctcttccatatcaaggccgttctcccggacaatcttttccgcagcgctccgaacgcctgcggccatcaggcgcagggccagagccttctcttccggctccagggcaagcaactcccgtgaggccgccagagcggtccgtcccgccggttcaagaggattcttcattttcataacttcatcccttcggtacaaaatatgttccgattccttccgctttcccctccagcagcagcgcgatgcgttccggatggcggccatgcagcatgtaaacgcccgtccccgcattcacggcctcccggatagcctgaagcttggcgctcatgccgcccatggaaaagcgcccctggtcctcctccgcgaacgccagcacggcatccacgtcctccacccgggaaatgatggcctcccgccttcctccggggggatacaggccgtccacgctcgtcaggataaacagagcgtcagcctccaccaggcgggccatatgcacggacaggatatcgttgtccccaaacttcaactcctccacggatacggtatcattttcattgacaatcgggataatgcctccgtgctcaaacaggcgcaacaccgtggcctgcacgttgcggcggcggagtttcaaatcctccgctgtcagcaggagctgggccacatccacgttaaagtggttgaaaagattctcatacgcctgcatcagccgcgtctgccccacggccgcgcacgcctgtttcaaggacagttcctgaggataggacggaagacccaggacggacacgccggcccctacagcgccggagctgaccagaaccacctgatggccctgctgcatcagccccgccagggcgctcaccagatgcacgatggaagaaccgtccaacgtcccattctctcgggtcaacacgcccgtacctactttaattacgattttcatgtatttccgccgcttatgatacaacaatccctttttccacaaaaagcggaaaacgcgtcttttccgcgctaacccgtgaaagcgccggacgcaaaaacggaaggaattcccccttcttcttccataaagataaaaaggatcattccctccgactgaccggctccggcgcggatgaaatccgccatcccggccaatatctggacatccatgaaaaccaggggcggacaacaccggagaaaaggactggagcatgccgtccgacatgtttcccccggctttattccctaaagcgccatacattccggtgagcgtgccgcaaaaccgggagcggcatgcgcggcgcttccatcttcaatgcttttccccggtccggaactggcgccggagacgcattttaggcttccaatatgaagctgatccgctcatattgcccgggcatgaatcttgaccttctccaaaaagccgccaaccaggcgcggggactcgccatggatgccgttcacgactgtgcatccggccacctgggcctgccgctggggtgcgccgaaatcggggccgtcctgttcggcgatttgctcaacatctgcccttcacagccccgctggctcaaccgtgaccgcttcattctctccgccggccacggctccatgtttctttacggctggctccacctgtcaggattcaacatcggcattgaagatatcaaaaacttccgtcacaaaggttccatcacgcccggccaccccgaattccgggatacggaaggcgtagaatgcaccacgggaccgctgggccagggtattgcgaacgccgtaggcttcgccctctccgccaggcgcgcggctgcccggttcaacaggcccggcatggatatcttcacccagcacgtcttctgcctcacgggagacggctgcctgcaggaaggcgtcgcccgggaatccctcgccctggccgccgtgctcaagctggataaccttattctcatttacgattccaacgacatcacgctggacgctcccgcggaacgtacccagcttacggatccgcgcgccgtatacgaagccctgggctgggatgtgcgccagattgacgggcacgacatcaaggccattaagtcagcggttgaagccgccaaaaacgccaaaaacgggaaaccccagctcatcattgccaaaacggtcatcggcaagggcattcccggcattgaaggcaccacaaaaggccatggggaaggcggggccaagcttcaggaagaagcgcacgccaactgggaaattcctgccggagaacgttattacgtctccgaagacgtccgtaccgctttcgcagacctgaaagcccaacgggaaaaagatttcaatgcctggaacgccatgtacgaacaatggcgccgggcttatccggaactggcagaggaactggacgcaggcatcaacgcctgctcctgcggcgtcaatccggcagactcggacaaggcaatcccgcccttcccgcaggactatggcgatgctacccgttcggccggagccgttgccatcaacgccatcgctaaagcgaatccctgcttcctgaccaccagcgcggacctttacagctccaataaaaactacctttccggcgcaggagacttctctgcggaaaccccggaagggcgcaacttctggttcggcatccgcgaacacgccatggccgccatctgcaacggcattgcctacgacggcctgttccgcgtaagcgccgccactttctgcgtcttcgtagactacatgcgcgcctccatccgtgtagccgccctcagcggactccccgtcacctatattctgacgcatgactccgtagccgtgggagaagacggccccacccaccagccggtggaaacaatttccggcctccgtgtcattccgaacctggatgtcatccgcccggcggacccggaagaaaccgcaggagcctggatggccgccatgcagcgtgccgacggccctaccgccctcatcctgacgcgccagaaagtggctacgctgaacggcatccccgttgagacccgccgggaaggcgtgctgaaaggagcctacatcgcccggaaggaacagggccccctgaaagccattattcttgccagtggttccgaactggaactggccctgaaagcggtggaaaacatcggggaaggaatccgggtcgtctccatgcccagcttcttccgctttgacgcgcagcctgccgaataccgggaaagcgtgcttccctcttcctgcatgagaagagtttccgtagaagccggggtcacggacctctggtggaaatatctgggctgccagggggaagccgtgggcatcaaccgcttcggcttctccgctcccggaacgcaggtgctggaagaactcggcatgaatgtggacaacgtcgttgccgccgttcacaaagtgcttgccagataaacagggaattttccccttcatctctttccaggggctgttccgcatccgccggaacagcccctttttcatgtctccccggttgccaggaaaaaggcaaggccgttttcacgaaccaccagtatccgtaacgcaggaactattctttcctgagaaaattccgttcgtttcccgtccggatttctccaaatacaagacctccgcacagcagcgccattgtccgaaccggtcccggataggactcagtccacaaaagccccggttacaagcagcccgttttcatcgcggctgccggaacggataatttcaggtttccttcatggcgccggtaaatatgcggggcggccatgatcaagcgccgcctctattgacgatacaatgaaccccaaatctgcaaaataacgagaggccggcccatacacaatgaaaaacgcccctttccgaaaaaaggggcgtctttaaagaccttggcaaaaagggaagcggcgcctttagaaagcggcttcaatcttcgtaatagtatacaccttcttcttgtcgccgtccatcgggacaatcttcacctggtcccctacacttttgcccgtcagctccttgccgacctgggaaagataggaaacgatatgcttttccggatttgtgtcccatgcgcccagaatggtgtacaccacgggctccccgccattcaacggctgaagagtcaccttcgtgcccatggcggcgcgggaggtatccgtcacggcaaaatccgtgccgcgggccagggccagcgcatgttccagttctgcccggcggcgattgagcaccttctccacttccttggcatcctggtagccgccgttttcgcggagatccccctccgcacgggaaatcttcttgttatgcaggttttccggaattttcacgtttaccagttcttccagctccttcttgcgggcctccaggctttcccaggaaacgaaaatcggttccggtttgtcggagttgtccaccagagcgtccagcacaatggcgtgcaggtccgggaatacgctgatgatacgggccatcagcgcgccgcggtcctgttcggagaaagcggaggtgttgtacagcatcttggcgaactggcggacttccgccacatcctgtcccttgatcatttcctgaatgatgctcttgtcctccatgaacaggttcttcaggcgcagcatgcggttggggccgccgtccatgtggtcctgttcaatcagggaaagcatcgcaatgcccacaggaaggccaaaaagaggcttggaagcgtcatgccgctggcggcatatccagatgagggactctgccggaagggtctggcgcagcaattcatgcttcaaatgcttgaccagcaccttgtcctgcccttcttctatcaggaatttggcgatttcccccacggcgcgggcgccgcctgcatcaaaaagctccagcgccttctgcggccaatcctccccaaagatggcgggcagcgtggcatacacgcgcttctgccgcacggcaggcatggaattgagcacttccgcgaagcgtcccacatcgccgatattggctcccacgatggaacgaaggggataagcttccttggccgcctccgtatttttaagggaggcaatcaggtcatccctgagcacagcaagctccagcacctgctggagggccaggctgccgccgttgcgcacatcggcgtccacggcgcgaatcaggacattgacggcatccggctctgccatgaccgcttccattttgatgccgtccagcacgcgcaccttggctttcaggtcggcggccttattgtaatcttccagagccgcctgcgcgcgggaaaggatattcgcgcgaagcgtgatgcgttcgcccttgcgggtgggcatcatgaactggacattggaacggagcatggcgcgcaccttgtcccaccagtttttccacttgtccgccgcaattacggtgcctttcagcgcagcttccagcttctccggagtaagggaattaccgtagccctgcaaggtaacgcgcaccagttccaccgggtcatccacggacaggttgatcagggattcggtatcttcataccgcttggccaggaaatggtcgtcactgatgaactccaaaattctgggagcgaattccagggcaacttcgtgttccggattttcctcaaaatcaatgaccagctttttggcggggagattccaggaaatgacttttccggcgccccaggaagcatggaagcagtaacggccaggtgcgatgcgatcaagtttttcggcgagagagggggtaattttccccagagacaataatttctccaagtcggcgtgcatactaaagcacatgatacgcccccccctaccggtatcaagactaatttccctcttccgtccggaggcgtcccgcacagcccttcaaagccgccacggagacagcggccgtccgcgtcacgctccgacttcgcattcaggtttcgcttctttttccctcccctccttcatccagttgcggcttgaccgtgcggagcgtctggcgtaacatttccgcacgcattcaacccctgcgcaacacgtatcatggaacctatttacgaagggaaggccaaacgcctttatacgactgacaatcccaacgtcctccgcatggaatacaaggacgacgccactgccggaaacggagccaagaaggcccagtttgaaaacaagggcaggatgaacaaggccatcaccctggtcatctaccgcatgctggaaagcaagggcgtgaaaacccacctggtggcggatgtggacgacatcaacattgacgtaaaaaaggtttccatccttcctctggaagtgatcgtgcgcaacattgccgccggctctttcagccgccgcatgggcgtcaaggaaggcacccccttcaagaagccgattgtggaattctcctacaaggacgacagcctgggcgaccccttcattaatgacgactacgcccgtgaaatgaacgccgctacggaagaggaatgcgccttcctgaaaaatcaggcccgcatcgtgaatgatgtgctgattgactttttcaaacaggccggacttactctggtggacttcaaaattgagttcggccgcttggcggaagatccctcccaaatcgtgctggcagacgaaatttctccggatacctgccgcctgtgggacatcaagaccggcgagaagatggacaaggaccgcttccgccaggacctcggcaacgtgatggaagcctacgaagaagtcctttcccggctccagaacaaggcttgagcctctttcccccctcccatgggagccggtctttccgccggcccccatttttcattttaccacactcttgagcaatatgaccctccactttgaagttatcagccggttccaggccgccgccagtgcggacgccctgctctatacccccctgaacgccggcctcactttccgccgcagccgcgtttacaccgtagaaatcaccggggacggacaaaaagcccgcgaatacctcctgagtgtactggtggaccccatttcccaggaatgcacggaacagaacgcgcccatcctggaaggcgccctgttcacgattgactacggcatgaaagccggcgccctggatctggaaaaagaagccatcctgcaaaactaccgcgggcgccggaatatgggctttactatggacggcctgaaaatcacccagcgcgtgtacgtcttcggccagggagacaaggaaaccctggcggcgcgctttgccaaggacgtctgcaaccccgccattcacaactggaccatcgcctaaccctttttcttttccatccacatgtccgccaaaacctaccgaaccgttcccgtgaggaacctgagcagcgacgaactgcttgaactcagcaaaaagcagaagctttccctgtcccgtgaagacatggaagtcgtccagcagattttccgggaaatcgaccgcgaccccactgacgtggaactggaagtaatcgcccagacgtggtcggaacactgcaagcaccgcatcttttccgcctccatcagccacagcgtcaacggaggcgcgccggagacggtaaacagcctgttcaaaacctacatcaaaaagccttccgagaagatcatggaacgcaagccgggcttcgtgctcagcgcgtttgacgacaatgccggcttcatcgccctggatgacaacctggccgtctgcctgaaggcggaaacgcacaaccacccctccgccattgaaccgtacgccggggccaacaccgggctgggcggcgttatccgcgacatcctgggcgcaggcaagggagccaagcccatcgcctccctggacgtcttctgcttcggcgctccggacacgaatccggcagacatcaccgccccggacgtcatccaccccctgggcatcatgcgcggcgtggtgcgcggcgtgcgcgactacggcaaccgcatgggcattcccaccgtcaacggcgccatccagtttgaccccacgtacatttacaaccccctagtcttctgcggcaccgccggcgtaattccgcgcggcgacatcctgaaggaaatgcgccccggcctcaaggtaatcgtcattggcgggcgcacgggtcgggacggtctcaagggagccacgttctcctccgccgctctggatgaagcctcccatgaggaagacttcaccgccgtgcaaatcggcaacccgattgaagagaagaaaacgctggacttcattctggaagcgcgtgaacgcggcctcatcgtcttcattacggactgcggcgccggcggcttctcttccgccgccggagaaatgctctccgtcacaggcggtgaaattttcctggacaacgcccctctcaaggaacccggactcatctcctgggaaatcttcctgtcggaatcccaggaacgcatggtcatggccgtggaggaaaaagaccttccggaactccggaagctggcagacaccttccagacggaactgaccgtcctgggccattccgacgacacgggaatcctgaaggtctggcacaagggggaactcgtctgctgcctggacaactccaagctgcatgacgcccccatcaagaagctggaatccgtattcacccctggcaaggcgctcacaggccagcccctcccggacaaggacctgaacaaatccctggaaaccgtgatgggggacttcgccatcgtctcccgggaacccatcatccgcgagtacgaccacgaggtgcagggcaacaccatcctgaagcccctggcgggcgcgcaggcggacgccccgcaggacggttccgtggtggacatcgacggctcggacaaatgcatggccatggcttgcgccattcttccggaatggggcaaaacggatccctacgccatgggtaccggcaccgtggatgaatgtgtgcgccagcttatcctggttggctccaatccggacaaaatcggcctgctggacaacttctgcatgggtaatccggaagatccggcggaactcggccgcctggtggaatgcgtgaaagccatcgccaaggcggcggacgcgtacaatgccccctttatttccggcaaggactccttctacaactactttgaaacggaagacggccccatcaacgtgcccgtcaccttcctctgctccggcttcggcgtggtggaaaacccggaccacgtcatcggttcttccctgaggaggagcaacagcctgctgtacctcatcggccatacggaagatgaaatgggcggctccgtcttcgcccgcacccacggggtggaagacggcaaggttccccagacggactgcgccgcgaacatggagctgtacaaagcctactacagcgccctgacttccggtctggtgctctccgcccatgacatttccgaaggcggcctggccgtcacggcggcggaaatggccttttccggcaagggaggcgtccggctggatctcacgaaggttccgaccgtcaacggctggaaatccccggcagtccccctgttcagcgaaagcacgggccgcatccttgtggaggtggacccggaattcgccgcggattttgaaacggccatggacggattcccctgcgcctgcatcggcagcgttacggaagaaaagcgcctcacggccacctgctgcggcggagaaaaggtgctggattgcgacatcgccaacctcaaaaagctctggaaggacggacttaccccctattattgatctcccgaaaccggcatcttaccaaacaaacgattcatttctaccaatatgcctcacgcacttttactgaaataccccggcaccaactgcgacgtggaaacggaacgcgccctgcgcgcggcaggtttctccacccagatccagcccatcgccacggctacgccggaacatgtcgccaaatcccagcttgtcgtcctgggaggcggcttcagctacggggactacgtcaccagcggccgcctggcccagttggaaacggaacgtttcctgggggatgccctgcagcggcaccacgccggtggaggcatgctcctgggcatctgcaacgggttccagattctcaccaagctgggtattcttcccgattccagcctgattgacaataaaaaggaacgctttgaatgcgtctgggccaaactggtgaaagtagccaaagactctcccttcctccagggcctgccggacgaattcgaactgccctccgcccatgcggaagggcgcctggtcacccgccccggagatgcggaaaaatatctggccgccggaaatgtggctctccaatacgtagacaaccgcgacggctgcgaatgcagcatcgccggcctccaggattccaccgggcgcgccatgggtctgatgccccatcctgaacgctttctgctgccccgccaccactatgacaaggactgggccggcaacgaagactggggctgggggtatttcctcttcaaatccgcctttgacgccctgaaataaaggttcattccccatcaaccgtttccccccgcattcattccatgacagatacggccctcatcggttcttcttgcgccctcggcgttttctggtcctcaaaacggtactttgactacctgattgatgaaaccaacctgtccctgatgcgcggcaaggaattcgggcaggccgtcattatctgcccctccctccgggaagggagcacggctattcggcggaatacggctccctttctggctcaggttaaaaccctgattgatctcctgcatgaggtgaaggcggaacgggtgacctacatcaccagcattgatacccagccggaaacgggaaatgaactttctcccttgctccgtgaaccggaagacgaatggctggcggctctggtggagctgaaagacttcatcaacctccggttcggccgcgtgctgaacgtttaccttccggaagtcaccggaacgggagccggcatgagtgtggcggatctgctggcggaggttccggagggaacggaagagctggacgtggctctgctggagcgccatcagctttatcccatgcaccgcctggtcagggacgtggaaaaagcctgggaatgcggcatcttttccgtgaatctggtgccggaacccgtcactgcctttgaactggtggagcagtgcttccctgccctggtcaaccgcctccccgtcgcgaaggaaacggacccgtacggaagcgccagaacatccgtttactccactcaataccacgatccggacaccggttatatcatggacaagcaggacgtcctggcggggctttccccggacaaacagtcctagcccccggtcaaaaaaactttttccaggccccgtctgcttcctgcgcagtcggggctttttattccccgccctcaaaaagagctccactgcaggagccgtgctttcctgttgagcgcatgccggaacggtgctatacaaaagccatgaagatcagcgacgacagccttgaattcttaacggaacttctggaaacccccagcccttccggctttgaaatagacgctcagcgcatctgggcggacgaactgcgcaaatatacggaatacgtccagtgcgacacttacggaaatacctgggccgtcttccacgcggacgcggaagaagcccccacattgatgattgaagcccacgcggatgaaatcggcttcatgatccgtcatatcaccaaggacggcttcctgtatgtggaacgcgtaggcggcacggatacggccatcgcgcgggggcgccgcgtgcgcttcctgggttcccagggagaagtgatgggagtaaccggaaacacggccatccacttgcgggaacccggagaaaaggaacccaagatttgggaaatttacgttgacgtaggcgcctcctccgacaaggaagtagcggaactcggcctgcgcgtgggacatgtgggcgtttactgcgacggccccatgctgatgaatgaaaacaagctggtatgccgggctctggacaaccgtctgagcggcttcatcctgtcggaaatagcccgcaagctgtgcaagctgaaaaagcccgtcgcctggaacgtggtgctcgtcaacgccgtgcaggaagaagtgggctgcattggcgcgggaatgattacccaccgcctgcgcccggacgcggccatctgcattgacgtgactcatgccacggactcgcccggactggacaagggcaaatttggcgatatcaggcttggcggcggccctgcggtcatccacggcacggccaaccatcccaacctggtggcccgtctggaaatcgtggcggacaagaacaaaataccgctccagcatgaagccgccggacgccgcaccggaacggatacggacagtatctacatctcccgcgacggcgtagcctccgcgctggtgtccgtccccctgcgctatatgcattccccggtggaaacggcctctctgacagatgtggaaaatacaatcaagctgctgctggaactggtcaaatccctgacgccggaagactctttcggccacaggctttaatacggagtatacggcggcatcgttgacaacataaggacatgaaccgtcctgccggggaaaggcgcgcaaaaacggccatttccccggcctgcttccatgcggctgcatggaagcccccttatatggagcagggcgtaaccattggccttgcaggcgtcctgcggcttcattcggtattaccatgcccgccgtcactacccgctcgatggttcccggcctcctctcccggaacattttcccggaaattatcccgaaccggaaaacggcaggagtctttccttccggtcacatttcactaaaatccagccgggtcacattaaaatacgtttttcccttccggcaggaatcccacaggagaatcagcatgaggaaaaagaggaccagcctccaggccacttcaaagggataactggttaccgccctctccacgccgatgcagttgcaggagagggaaagccccctggcccagccctggacgaataacgccacgaatgtgaatgtcagcgcgctgcccagcagcgcggccccggcgcaggttctgcggaacaggagccccagccccaccacaatttcacacgacacccccaggcaggccaggggatgcccccaggcctccgggaaaatggcgaaacggtcgatcgtctcctgaagctggtccagatgaagcagcttgcgcaccgcgacgaacaggaaaaagcctcccatccccagccggagcaggagcaggcaaaaacggacgatcttttcccttagcatcattggcgtattccgcttattcgaagtgggtttgctgggcgctcactttttcattgcgcaacctgttcagttcatggcgcaccttttccagctccatctgaagggatttctcccgttcggagacagaggccgcggcggaagacggcgtcccggcagctttcttcccgcagcctacggcgtcttccgtaaagagcattttcaacccgggagccttcgtgtcaaactttataacgccggaaacaggcttttgggagccgggatgcttcacggaggccctcaccgtcaccgtgccgggcttggcgcccagacgcaccagagccggagcggaaccccatttaacgggctgggtcagcgtgccgtccggggaatccgtcagcagctcggcaggaccttccacggaaaagacaatctcctcatcattcaggcgcttcactgttccgcggccatccgtaacctccgccaccacggcaaacacgtcggaaccgttggcgtacaaatccactccatcttcccggtccagagtcaaccggatcttctccgccctccgggccgggcggacttcatgcctgaccaccaccttgccgcctatcagaccttccgccaccagtttcaccgctccctccttgcctcctcgggcaagcttcttgttttccatgaaatcccaagctttagggaacacgacgggcacgcgcttgaggcctccgggacaggacgccaccttcttttccaccgggggtcctccgttgacactcaggcgaacggaatcacaattggaaaacaccgtcacgtcttccggagaaaagggagtgcattcattggcgatgtgcaccacagggccggaacccaacccgtttcgcgtcttctggggacgctgggacataaatgcgtaataggaggttttgggctgcctgaaagcatccagaataccgccgtagaagggatccggatggtaaccgcgctgatggtcgaaaggatgccacaggcagccgccgaaatgataggccggagcggcgttcagcgtatcgtacgtcgtatatgggaacgaggtcttgaggtagtgaagggcctgcaccatcatgggagcttcaccccagtgacgggctacacgggaggtggagttgtgggcggaccaggtatccacgttatcaccgaattcacgggtaaaatacggtttgctgttcttccgttccttgatggaccagtgtttgtcccccgtaaccgggtgggcatacagaacttcataatgctggctgccctgagccaccgcgtcgcaagcggtgtagcatcccttgtacggatattcctcatgcaccaggtcgcgggcctttttggcgaaatccgccgggtaatgagtttcattcaaaataggttcccacatcatcacggagggatggttcctatcccggcgcaccatctggcggatatcgtcatacacccggtcagcaaaagggccgctgccccagaactgccagcccggcgtggcgacgatgacgaaaaggcccagacggtcgcaggcgtccatgaaagccggatcctgcggataatgggcgctccggatcacgcgcatgcctgccttcctcaatttcacggcatcctgccattgcaggttgttgggcactgcattcccaagccgggcaaaatcctggtgcctgttgccgccaatcagcttttcaggaaacagggatccattgagcaccagccccttttccgtaatttccaccgtccggacacccacccttatggaacggttgtccagcaaatgggccggatctttggaatggtcccctccaacagcgtcccatacttccacgctcaacgtgtacaaatcgggattgtccggagaccacggtttcacgttggaaagcacaagaggaatatccacttcacccgtggaatggggcggaatagtcagcggaaccgtctccccggcaggatccacccccttggggtccgtcatcaccgcctgcacgcgcaccttccgttccttgtctgcctggttggccacctgaaccttcacccccaccttgcccttgcgggtacggggatcaagaaattccgtccggaaaaaaactccccctccggccacagttccggcctcgttcgggtccgtgatatacacgggtccggtggaaatgaggtacacatcccggtaaataccgccaaaataggaaaaatccaggccttcctggggtttgccggggggataggaagcgtcgttggaattgtccgccttcacggcgatgacattcttttgtcccggtttcagccacttgtccagattgacaatcacgggaagatatccgccgaaatgctccgcggccttctccccattcacccagacctcgctctttcccatgatgccctcaaaatacagggtgtttctcctcccctccaaccgggagggaggaataaatgttttccggtaccataccggcccctggtagttggaacagccgctggcctcttccggaagaagctcaatgccgttggggaggttgacggactcccaggaggaatcgtcaacatccgggctggccgcttcctccggtgtcttctctcccttgaacagtttccagcccacattcatgccgtaaacgtcccttttcgttacgttttccggcaggcgaagagcccctgccacggaataggctcccgtagatgaagcggcctcctcctgatcggaaaccgcatcggcataaagggaaaaagagccggccagacatgccgccgttatgagaatggtagtgactttcatcatggaataggggaatgcaaaattaatatacggagctcccccggcgccatctttcattcatataatacatccttgcgtataatgcaaatacatatgtcatccggcatcttccgcttgacctggaaggcatgttttttcatagtcgactcgccctgtacgggattatcccgcagccccggtccgagtgccaggttttcagtcccgtgaaaaggaaaaagcgaggcgttcctccaccggctgtctcagggctatgcctttatccactagttttttatgtcatctttctttcagaaaattgtcaaacttttctcctatgacattggcattgacctgggcaccgccaacaccctggtcaacgtcaaggaccagggcatcgttctgcgcgagccttcggtcgtcgctgtcaagggggacaaggttctggccgtgggagacgaagccaagcgcatgctgggccgcacccccggctccgtcacggccatccggccgttgaaggacggcgtcatcgccgacttctacatcacggaggaaatgctccgctacttcatcaaaaaagccacggccaggtactacctgattaagccgcgcgtgctcatcgccatcccctccggcattacggaagtggaacgcagggccgtcaaggaatccgcggaagcggccggagcccgccgcgtgcatctgattgaagaacccatggccgccgccatcggtgtgggccttccggttcaggaagctgcgggcaacatgattgtggacatcggcggcggtacgacggaagtggcgcttatttccctttccggcatcgtttacagccgttccgtccgctgcgccggggatgaactggacgatgccatcatctcctacatgaggagaacctacaatctcatggtcggggaacgtactgccgaagacatcaaaatccgtatcggctccgcctatcccctgcctcaggaactctctatcgaggtcaagggccgcgacctggtcgcgggcctgcccaagacagtgacgattcgatcggaagaagtgcgtgaagctctcacggaacagctcaacacgattgttgacgccgtgcggacgactttggaacgctgcccccctgaactggccgccgaccttgtggaccgggggattgttctggctggaggaggcgctctgctgcgcggtctggaccagctcctgcatgaacagacgggactgcccatccacattgcggaagaccctctgagcgctgttgcggaaggtaccgggaaagccctccaggaactggacttcttcactaatgttactgatgcggaagactaaagacggaatctccggagcaagcgctccggccttgcgtctgccgtactgccgcatcacatcaacgcaactgcctgcatgattcctttccggccatccctacagcttcaactccagccgctcctgacgggagacggcccaccggaaacattacgggcaatagcacaccctagcttattcacaccccgtgtttacaaaaatgcttaaaaaaatcaaacgggccttcggcttcggatcctgcgatcccatggaaggctccactatcatcatcaatgccgaaaagctcgaacgccgcgtagcccttctggaaaacggcgtattggaagaatacaccattgagcgcgaaggcgaagacaacatcgtaggcggcattttcaaaggccgcgtcaagaacatcgaaccgggactcaaagccatgttcgtggacatcgggcaggaaaaaaacgcctttctgcacttctgggacgcgcttcccgctgcactggactccagcctggaagaaatcgaacgcgaaggccgtccgaaaaaacagcagcgcaaaatcacgtccaaagacatcccggacatctatcccatcggctctgaaatcatggtgcaggtcaccaaaggaccgatcggcaccaaggggccccgtgtcacaacgaacgtatctctggcgggacgctacctggtcctgatgccctttacggaccagttcggcatctcccgtaaaattgaagaccccaaagagcgcctgcgcctgcgccagatcatgcagaaactgaatgttccggacggaatgggcatcatcatgcgcacggtggcccaaggccagcgctaccgccactttgtccgcgacctcgccatgctgctggaacaatggtacagcgtggaagaaaagaaggaggccaatccggcccccgtctgcgtgtacaaggaaccggacctgattgaacgcacggcacgggatttccttacggacaccgtagacaacatcatctgcgacaacgcggaaaccacggaacacatgcgcgccattgccggaaaaatctcgcgccgcgccaagcgccacatccagcacttccccgtgcgcacgcctatctttgaagaactgggaattgaaaaacaaatcaatgaagctttccagcgccaggtgctcctgccctgcggaggctacctggtgattgacgaaacggaggcgctgatcgccattgacgtcaacaccggacgcaacaagggcaccaaggatctggacaagaccattctggataccaatctggaagccgcctatgaaatcgcccgccagcttcgcctgcgcaacatcggcggtctggtagtggtggactttatcgacatgcgccacaggaaggaccagcaggccgtttataaggccatgaaggaccgcctgaaacgggacaaggcaaaaacccaggtactgcagatcacccccatcggcctgatggaaatgacgcgccagcggctcaacgagagcctccgggaatccgttcatgatccatgcccgtactgcggaggcaggggccgcgtcaagtccgtgatgaccatgagcgtggaaattcagcggcaaatttacgcctgcatccagaaataccgggacaccatcggagacatggttatcgtcgtcaactcggaagtgctctcccgtttcaagaatgaagacgccagcctgctcatggaactggaacgccagcacagcggaaggctgattttccggggcgaccacaaccagcaccgtgaatccttcgccatttacgacgcccgatacgacaacaaacccctctaccagtccgggcaatagcctgaaaatcaaatccggctttccgggccgggcgataccctcgtccggccttttttacgccgccatgaacaacatccccacttcccccaacgaccccgtcaacacggacattctgctggtggcggaagaccgcatcaaagggttccgccgcctgcccttccacgccatttccgaacaatgcggacatcctgttccggtggttatccagcggctgaaagccatgatggaggccggagtagtgcgccgcgtgcgccagacgctgctggcgaccaagctggcccagggagccctggtggcctggtccctgccggaggaaaaactggatgccgcttttgactggatgaaggagctggacccttttacgggccatgtggtgctccgcaatacggatgtggccaaccccggcgccaactacaggctctggaccacggtcaaggtgcccgtggggtgcggtacgccggaggaacactgcggcatcctgaaacgccatatcggcgcagacggttatgttctgctgccggcacgcggcgtctttgcgctgggggtggggcacatgcgccgcaggggactcaggcccggagaaaaaactccggaaccggcccccatgcaggaaacgaaaaccgtatctctttcagaactggaatggaaggtgctcctctccgtcaaggaacagctcaggcctgaggaaatggtggaagatccctggtccctccgtgccgcccgggcaggattggaaacggaagaatactgccgtacggcggaagaactggaccggaagcaggtcatcggccgtttcgccacttttctggaacatgtgagagccaaaacggacgacggccccgttaccaaatacaacggattgttccattggacggttccctccggcatggaaatccgggctggagcggaatgcgggcgccacatctgcatgacccattgttattggagaacaggcggagatgtttttggaggagcgcaaatcatgggtgtggtacacggattggaaaaagatgccgttctggagcacaaggcggcgattgaccgccatctggaggcttccggcattcccatcctccacacggctgttttctggggtgaacgttcggaaatcaagccttccgagatttctccggaactgtataggaaatggatggaagaagtaaaaaaagctcccgttctgcagtaactcccttctccacgcccgcctccggcggtcttcccctggggtagaacagcttttccctccgaactcccgcgaatgccgtcgcgaaggcacaagcatttttaatgctgcaactgagatgccggctgtttcccctccctccgtcctgcagcaccgcttagttccctattcccggcctacagcggcttaataccgttttcccggacgttccaggatctttgatatattttcctgtcaattcaggaaacgggactgaagaaatccgtttcaagccttcaggaagacgcacgcctcaacctgatgagctattcatgttctcctttgctccggcgctgtttcctttccgggatacaccgggagaggcttctgcctgcagaaacaagaaaaactcaacacaagggccgtctccccccttacggggagacggcccttattaaagaaatatcggccggcgaacaacctgccgcgaagctttattactgctttttctgcggctgtgcgggagcctggtcaggagccttggcgggagcaacagcggccggatgcttgtaggaaaccgcaaaaccgtcatacttggccggcagcttcctgtccgggaacatcagttcatgcaaacggtacagggcagccgcttccttgacaggagcgggacgggacttcagccgtgaatccggaatcacagcttcgggattattcttcctggattccacggcagatgagacgacgggattctcaaagaatttgacaacatccggcatgcgcaggtaggcatccagggagcgggccacgcaggcagacgccagttcttcatcggaaccatgcagcaaaaccagggcttccgcaaaataatccagcgccttgttccaatcctgggccaccatggcggccgcacccagggcatatttcatccgcgcctgctggaggcgggtggcattctttttggttgccaggaaagaaccggcacggcttttcacgccgttccagtccttatccggaatcaaggccatgatttttgccacctccaggtcattctggacggaaggggacaaattggcccctctgacgggaaacttggccgccaaccctttgactccagcccaatccatcatgcgcatagcgcactccagttcatagacagccgcccgggcggacaggctgtccttgatggaaagcgttgaggcatacttattcaccagagcgtggaatttgttgcgggcttcctggtacttccggttttccatagccaccttggcatccacaaagtcgtccgtttcaaaaatatacagcgtcttgaaggcgctggccatctgctgaaggacttcctgggattccctgctctccacaaactggaccgtgggtccattggcggaaagaatgtagatatccgtcggacggccattcttgatggtcggtgcggcaactctggcgcgcaggcgctggggattctgggcattctgggccatggacggaaccagggaggacagtccggccaataccattattactgaaagtgctttcatatgattgattactaaacctcttgttattatttctggcccttggcggcgcgtacggctgcttcataggcggcaatgtccgcccgttcctggctgacggcaggatcggaaccgaacttagccgtcttatccttcacctcattgaccagggcgctgtcctccgccgtcatcttcttgcggttggcgggagtatccagcaactgcacgtactggctgccggccttccaagcaacgtacctgtcggaaggctgcttgcccgcaccctgggacatcgtattcctcttccacagcgtatccatctgcgccagcacggcgggggcggaccacttcacgagccccttgtacgtacccgtgatgttcatgaagttaatcaacgccttgtccagttcattctgcttcaggtaggcttcaccctgcaaatagaggacttccggcagattcttcttataggtcttgttttcgcggtacttgtcggcagcggcaatgacggccggccagtcctggcgggcggaagtgaacttgaccagattgtactgggcgtcttccatggctttgcggtccgggttggcgctggattcttccttgctcagttcatccctcatcatcttgatggcggtgtccaccttggcgttatccttgctgcgccccagagctacggctttcccgaagaccgcattcttgcggtacttggacatgccgttgatgcgagccttcttacgcaccggatcaggttccgacgggtccaggatttcatcaaagtaagcgatgctttcttcaggctgggaagtgccggccaggtgcatgccaagcttcacaagcgtgtacgggggcagatcggaaggtttgaagtcgcgcttcagctccacgaagagctgcttgaccagaccttccaaggcggctttctcggcacgctgttcgtccgtctccacaggagccttttcataccgttcctgagtttgggcaataacggccatgcgaagcatggcgctcagcgtcttgtctttatcattgtccacgccggggaaccggtagaagtggttgcgcatggcattggcatccagattgcggcccagggcctgattgccggccatgtacgtcttggtataggaattgacggcttcttccagaagaacggtcatcttgggatcgtccttcttgccttccctcacaataatttcctgcatcttgacggatgccgggtcaaacatctccttgtcatccttgaagaattccatggcggcggcggccagctggaggctgtagcggctgccgggctggtcgctgtctttccagtactcgtcataccatttcttgacctcgtcccggcgcgccgtcctggccgtttccacggcttccttcggttctaccggaagaggcttcttggtagcgttaataaacaggttgtacacggcctccgcagcgggacgcttgtcgcccagcttcttggcggactccagagcggccaggaaatagccttccgcttcctgctcatgttccttgctgccggcatacagattagccagcagattgttggcatacgggaacaggcggtggtctttgaaattgtccacaatttccttcgcatctttcgcggcgagctcttcgtctccggggttcttgcggtttaggtagttgaaggcccggtcatacaatacggcggccatattggcctcacctttgtccgggaaacgggcaatgtaattggtaaaggaccggatggcttcatccgtattgcccaggttcgtgtaggtttcaccaagaaggtacatggccgttttcagataagtgctgtcacggtattccttcacgaagcgttccagcaccggcaccgcttccttataacgggaggcgtcggcagcccccaggttgaacagggaggctcctttgcagtacagggccagttcatagaacttatgggtggggtcatccttatgcagctccatgaccttgtccgcctgctgaacgcagagatcgaatttcttttccttcagaagcccttccaaagacagcgtattaagcatgggagcatacttggaattggggaattccttcaggtgctgcgccacaagctcgcctcccttgtccgcttctcccagctgccaggtggtcattgccagataatacaggttatcctccctgcccggagcatccgggtaggattcattgataagctggtaggcggcgcgggcaaccctttgggaaccatgcaccaaggcctggttgcccatgaagctgaacgtaaaagcgtccatgacctttccttcctccttcatcttgttgaactggtcgatcagggctgtcaccttcgctctgtccagcgtatgggaaaaatccgtcacgccaggcacggccccgttggcacggcccagacgatccagggaataattggcatccgccattactccggactgatcgggaagaaggcccatcagcaccatcgccagggaagcataatcttcagactctttctgttttccatcctgaagcagggaacgggatttctccagcacttccgcaacgtagctcaccagccgcggagtgtacaaagccacacgcgtgggactgatattcatcacggaagggtagttttccacaaacttcaccgtctcactgcatttgccggtcttaatagcggcatccaccatcgccaggaagccattggtaataacggcatccgtaatgcggcggcccttgtagcgtgacgtaacgcaagaggtaaggttttccattcctttttcaaaagcaggcggggacatcttgaaatagcattgggccagaagcccctgcacttcaccggcattgacgtttctggcgacaggatcgctgcggtattctttcaagaatttttccagcagctccgcgcccttggcaaaatccccaagacggcagtagttttccccttcccggaacagggccattttcacgagctggtttttagcgctcgggaacttggtgtaacaagccttgaacgcttccacagcttccttgtaattcttcagctgggccagacagacgcccttctggtaatagaaccagccgaagccgtcatccagccccagcatcttgatacggggttcataaacgcggatgcagcgatccacggcatccagggcctcctgccacttcccttccttaatggccgtcagggccgtgcgctggtaatcgcgcgggccatgctgagcgccggatggaagaaccgccccgatactcagcacggaaaccaggcctgcagccagtgcagtagtatagtttgatttgatcatgtgtttaaaattcgttgaaacagaagagataataaaacaggcgcaatatccgtgcaaatacacggaatacacctatctgtaatggattgcgtcattttaacaagatgtgtcaaactctaaagaagaaagttttatctttttagtcatccttgcaagaaagttcttccatcccgcgtttatcgggagttggaacaggtcggcgccgcccggccgggaaaatactgctttttcaataccctgctacacactctgcggccaaaggaatgcacgctttccgccttcaaaagtttttcggtggaatacagcctactgctccatcatgcccttaaggagcctcgaatcccgtctgtcaagatgccagaggcatatttaacatggcgcaaacatatcgtccgcccaaccggaattccatttttccggcatccgcagccataccggccttctccccggcaacagctacccctcccctctcagttctcctttttcaacatgaaatcccattcgcgagttgaaaggaaatatcatgaaaaaacagctattcttccccacgggaggtacgggaaaatacacttcctccccgtacttcctaataacaacatcacttcccgaaaatcatcaacaaggattttcctgttactgcacaaataagataaaggcttcgagccgcctttctctctgctctgctgcaccctccttccaatatactctttccatctctcccgtgaatgaactggttttctgaagccagcccttccaatactctcctgaatccgaatctcctgactgcctctcctcctcccagccagacacggaatgcaatactggaaaaaaacggcaacatttctcctgaagctccgttcccggacagaattcacggctatccgcccgccacctgcggtttcacaaaagggaaaaacggattcagaaccgggctatgaaaggagtattgctccagccaaaaccgcatatcccaaccagaacatttaccgtacaataaaaagggcatggtccggctccggatttctccacagggcttcccctccttgccgcaaaatgctgccgtatgcgggcgtccgtttctcccgtcaataacaaaaagcttccgctcctcttggggagcggaagctgagagtcaatgaaaaaataagggtaatttatttttagtcgttcttaaggtcggtcagagccaccgttgtaatcccggcctccgtcaacgcgttcatgacgtcaataacgcgctggtggggaacatccccttccacccacaactgcactaccggcttggtgcctacagcgctggcctcctgttttttggcttccagctgctgcacgagcgtcgccaggttgtggttgttcatgtcattgtcgatcatcaggctgttgtccttaccccagtaaatggtaccgtccttgatgatgcggatcagcgccggctcaatctgggaggcgttttcgcccatggcttggcccggcatggacatatccagcttgcgttcctgaatcagggaagtcgccacaatgaagtaaatcaacagaaggaaacatacgtcgataagggaagaaatatccagcttgggatcttcatcctcgactgcctctagttttttatgtcttgccatagcgcgtaatgttattcagccttggttgcaggagaggaattcttggcaggcagaacggcaaaaatcactttgatgacaccgcattccgcagccacgcggattacctcccgggaccctttgaagagggcctgctggtcgccgcgcagataaaggcgcgtttcaaaatcctgcctgtccttgaagcgttccacaaggttcttgatatattccttgagttcgtcggaggaattgagcggggtgcctacgtcggaggaccagagaacgctgggatctacgccaggcggccgcttgcccgcgccttccccataaacattcaccacaatgcagccgttggcggatttcacttcaccggaactgctggccgtaggcatctggatgttcttatcctttttaacggtaatagccgtagcgttcaccacaaagaaaatcaacaggaggaaaaccatgtcgatcatgggggacatatccatttccccattttcttcttcaggcgctacattagcttttttcttacccataagctacattttgttgaggttctccggcccggttccgactgagcggacgcttctgggccggaccgcctgttccggcaatcaggccaggccttcggggatgcgggcaagctgggcttcggcattcaccacgttgatggaggtgttcaccatttcctgcacagtgcccacacattcggcaatctgggcgttggcaatgcccttctggaagaagaagaacggagtggcgataatggcgttgatcaatccccagaacgttgtcagaagagccacggaaatgtcaccggccagctgggtggggtccgcctggccggcggtagccagcgtcccgaacgcgcccaccatcccctgcaccgtcccgaacaggccgagcatgggagaaatctgcgcgcaaagggccagcatgttgatccatttgaacacggaacggctttcattggccgtaaagtcggccacggcgtcttcaatagcatctttgccgaggtcttccggacgggtagcgtccacattcggcagggcgtaggcaaccagacggcccaaataggtgggactgccggccgcaacttcaatggcggaccggatgcggcattcggccatcagctgcaacagagtgaccttgagatcttccgggcagaatttttcctttttcagggctaccatgttgtaaatcaccaggaaaatgatgaaagcttccaccagcataatcggaatcatggtccaaccaccggcgatgatccatttgtcaagcatggtctgttcctgcggggcaacggcttcggcggcttcctgagcgaaagcggatgtagaaaacgcagccatcaggacggaagcaaatgcaacgaaacggaaacccagtctaaaaaggttcttcataatttaagttatatggttgttcgaaaagatactggtgtattaaagcatgcaaattcagacttgcaagcatcattttagaccctgtaaaaaattcagacgccttcgcagccgctctcccgggccagccggctgcagatggggcagcgccccccgcatccccgcgcaggacaatattcacggccgtacaagacaatacgcagatgaagatctccccatgatttttcagggaaaaggcttttcaaatcgcgttccacggtttccaccgtttttcccgtgctcagcccccacagccgtgaaaggcggaaaatgtgggtatccaccggaaaggcgggaacgccaaaggcctgaaccatgacgacggaagccgttttatgccccacccccggaagagactccagagcagcaaagtcgcaaggaacctttccctcatatttttccaccaggatgcggctgaggttcacgatggcggatgccttcctttccgagaggccgcagggcctcacaatttcccggaccgcttccacatcctgccgggccatttcctccggggtggaggccagggcaaacagagcaggggtcaccagattcacccgcttgtccgtacactgggcagacaagagaaccgccaccagcagcgtgtaagcgtcgcggtgcaccaggggaatgggaggagccccgtacagggacatgagttcctcctggacaatggaagcccgtttttccgtattcatgccgccagattaccactccgcccgcacggcggaaaataaaaaagcgccgccatgcagcgatggcggcgccgggatggaaaacatgggtcagtcggccttggcataaaaccccttggaaacgcggtgctgcagggccgcatacatggcgcggcagtgcctgtagccgcgacggctgccgagcacctccagactgttggcgggatctccccagcggacgatagtcagttccacataacggcggccccattccttcatcagctttttgttgggctggtaaatatcaatggttccggtgccgaccagggcgcttccgtaatcatcaacaacgtaaaggtagggctggcccttgatgcggaaagtagtccccaaaggataaacggaccagtctgcagcggcgctgcggacggaagacgtgtatttcagcgccgtaccgacggcattccggggaccgtaggccaaatggtcgcgctcggaatgggtataagccgtggtgcgcactacgcgggtgcgctgggcgggatgataaaacggcatcttgtgcttgtcgcgccccaacttgggaagtttggaagaaggcgctgccgaacgactgggcgccaggggctggacgaatccctgggcagtttcacctacacgggccaaaacaagagcgtcactactggatttccccatgccggttacagcgccgtttgtcgaacagctgctgacaaacatggccgcgacggcacaagacagggtggcaattattcttaaattcatgcggtacgaggttaggcgccatacacatggcagtcactccggcaaaaccttcaggccatgtgcggaagccggaaaatcggcgacggcggctcttgggtacgaaataatccctgccttggcaatcctttttttccgcccaccccctcccaaacaaggaaaacctattaagataaattactaaaaataaacaatatataaaacatgccgcatttttgtcatatcatgacaaataatatacttcccgaaatacttttttctatcacaacacgacacacttttttatttttatcatatttcatttataataaaaaatttacacgcatgaaaaatacacaatccctcaaaaatattccctgaaaaaagtgtcaggggctgtactccgcaaaggcgtcatgagcaagaaaaacgcgtctcccgttgaacggatttccctctgccgttcaaggtttcacgcgaatcctaatcgactccttgccatatccgcattttcacagcccttccatgcggcagaatgaagggctcaggaagaggttggtgagggcattcccttgtgaggaggaaaccggaaaagtccggattctgccaggtaatgttcccaccgcagaaacgcgctatagaaaaagacgcgcaagcccgcttgaaaaaaagggctcctctcccttgccgctgtcttctaaattctggataacgctcataccagaaaagcgtatccagccgggaaaaaaactttcccctccgtttaacggcatctaacgcgggaagggagctcttatggaattttcttctttccccttcccttccgggcggccctccataagagtccccggcgtttcacccggcagacaggcacataccgaatgggctgttgcatccatccggaaatagattacactccggaacgaacatgtccgccggccttccccaacacctcacgctggattatctgcgcgccctgctatcccggggcgtggagaaaaccaccgtcacggaggaagccagaatggtcctgagaaaatgggtcatggacgcgcgccggatatccggccccccccccgcttccgtttccgccaagcctgccgcaaatgaaacacggccgaaacagcccaccccggagcagacgcctccagattccgtggatgaagcatccttcggcaatgaactccgggatatcctcaacggagtacagccgcacagaacggaggaggatgctccggtaccccgccatatttcctttgatctggaaggtgaaacggaggaagaaaaactgtcctccctgcgggagctggtcgttaactggccgccgctccggaacatggattccttgagggaaacgcccgtgttttcctccggcaatcccaaggcggacatcatgatggtaacggacgcccccggcctgtatgaagaaaaacagggggttcccctggccgggccttccggacaaaagctggacgccatgctgaaagccatggggctttcccgttccgatatttatctgacccatctggtcaaataccgcccggccctcccccggcagcttaccaataaccgcccgcctacagaccgggagatagaaatttccctgcccattctccgggaggaaattatgctggtgcgcccgaaagtagtggtggccctgggagcaatctccgcccgcggcatcctccagtcaggagagacgcctctttccgccctgagaggcaccttccacacagctttcaacacgcccgtgcgcgttacttataatcccagttatcttctccgcacggaagatatttcagaaaagcgaaaggtttgggaggatatgctgtgtgtcatggaacaggcaggtctgcccatctctgaaaaacaacgttcctacttcctgcccaaaaagtaatatatggattatttaaacagtattctggggcgcaaacgcgccgatttgaaaaaacttcttcccctggaagggaaattacgggcctccgccatccagcggaatgattacgcgggattccgcaccgcggtggaccttggggaaacccgcctctccgtagttccggaaatatccagggtgcatcccgccctccgcctccaggaaggagtacaggatatccggcacatgtacggcatgttcctccagggcggagcgcagggcatttccatcgctgtggaaccggaagtatacggcgggtcatgggacatggtttccactgtttccagaatcagttccattcccgtcatggcgcgcgacgtgttcattcatcccgccatgatctgccaggccatcgtctcgggagcggatgccgtcaacctggtggcggccgccctgccggcaaaggatttgtcggagctgtaccgcatggcttccgggctgggactggacgtaatgatggaggtccataccctgaaggagcttgaaaccgtcatggacctggaagcggaattcatctgcatcaacaatgcagacccgcacactctccaggccaatcctgcagtcacggagaaactcattgaagaaatacccgcctccgtcactgtcctgtccgcagggggcatccgcaccgtggaagacgcgcgccgcatgctggacgcaggagccaatggcgttcttctccaagacgaacttgcccgcatggatattccccaggatttcatggaggccattctggctctccgggcggactgattttccccttactatattataatagaaaagacatctgcatccgcacgcatggggaaatgcaggattggagaaattgctccgccactgccggcaggactccgtgacctgggttccatatcctccgcgttttcatcccgcctttccctgtattttcatgaaacgtacaaatccttcgccccgaatgccccgcggatatgccggaattccgggggcttcccttccctgtacaggacttccacaacatcgtagcggaaattcaccggttccggaagcaggcgaagccattccgccgctccccggcgtatcagagcccttttgcgggcattcacagcgcgtcgggcacctccataaccattccccgtacgggttttcacctccacaaaaaccaggcactccccttcccggcacaccatgtccagctctccgcctctgacgggacgccaatttctcctcaggataacgcacccttccgcacgcaggaaggaggccgcagccagttccccgtacattcccagccatgccgtatcccgcttacccctgctcagggatggacagttccatttgtgaaaccggcgcaaacgagcggcgatggagcggacagggcccatgcctccgcagagcttccatatgggctttcgtaccatatcctttgtgttttgcaaaaccgtactgcgggtaggaagcgtccgcttccgtcatcatgcggtccctcgtcaccttggccagaacgctggcggcagctatggaaaggctcctgccgtccccctttacaatggcgcggtgcggcacaggaagccccttgacaggcaatccatccaccaggcagaaatctgcacgcagggccagaccttccaccgcacgcgccatcgccagatgagtggccctcaaaatgttgaaccggtctatttcttccacggaagccactcctacggaacacaccgcctgttcacactccaaaagagccagaaacaggcgttccctttttgctgcggtcaactgcttggaatcgttcaaaccggttaactcctccgccagaacaggcaaaataacggcgccggctaccacgggaccggccaacggcccgcgcccggcctcatccactccagccacgcaaagaaaaccggaggcccgggcctccatctcaaaactcatatccggatgcggtttttccttcatggcgctattcctcctcctgttcctccggaaggcgggccagcagaatctgcgtgattctcctgccgtcagaccccgtcaccacagcccggtagcggccaatccgcaattcctccccttcttccggaatataacccatccggctgattacgtaaccgcccagcgtagtaacgcccggacaatccaaatccatttcaggcaggtaatctgccaggtcaaacagggtaatagccccattgacggcatatgtatccttgccggttttcacaaactcccgcatttcctcctggtcaaactcgtcctgaatgtcatcccccacaatctgttccagcacatcatccaggaataccaggccgatagaatcaccgaattcatccactaccagggcaaagtgggcatgttctttcagaaagaacgtgagaaggctgtccaggggcatcgtatccggcaccacgcgcaattcacgccgcacgctcctcagatccggattttcccgtcctaccagtttgagcagatctttgacatgcacccagcctttcacttcatccaggtggtctccctccaccagcggaaaccgggtgtggcgggatttccgggcaagctcccagttttcctcaaagggagccgtcaaatccatcacatccacttcagagcgcggggtcattacgtccttgacgcacatatcgttcagttcaagggcatttttggaaatttcagcctcctgcttcgtcagctcgcgggaacgttcgctttcttccaccagatacatcaattcatccgtgctgtgcactgtgcacgccgtggaacgggggtctatgcccagcaggtatttcagcacaaaccgcgccattccgcccgtcaggccaagaatacccgtatatctgaacaccgtataaaagaaatacagcaggggaaccgtcgccagggcggccttgtccggctggcgcatcgccatagccttggggataaactccccaaataccacctggcagcaggcaaagaaaataaatgtaacggccagagcgattccgtaaacggaaaccatgcctcccaatcccagggagaccagaaagggagctgtcagttccgatacaaaaaacgttcccaggaatcccaacgccagggaagaaagcgtaatgcccgcctggcaggcggccaaataaagatcaggatgcttgacagccttccgcgcccgggccagttttttccgggttcgggccggaacaccttccccggcgtgcagctggctttcacgaaccttcatcaaggcgaactcgcctgccgcaaaaaacgaattcaacaacaaaaaaaggataaagccggcaactgccagcatcatcccacccagcgccgggcctgcaccgggcgcttcagcggccccgaaggccgcaagaatactcagaggatccggatcattcattctgattcaaataatatattcggagaagaaggcagagatattgcccggcactttgtcatcacagtttttcataaacgcccttgtcccggcgctccagcacggtgaatccggcagccttggcgtctgaaacggaaagaggcttggtcacctccggcacattaatgcggctgatgaccttacgcacgggatgcttgcacaccaggcatttttcaagcggagcacggtccacgggacgcctcaactcaaaaccgcggcggcacaccggacaggactgtccggggtcgtcagggttttcagaaatatactcgtatatgggcatagcaaaacgctaggctaaataaaaatcagcctagcgtcaaaatctttataaggctgcaaccttttcctgtccttaccagctggacttggtcacaccgggaatcatgccggcattggccagttcacggaaggaaatacgggaaagcttgaaacggcggataaatgcacggcggcggccggaaacaaggcagcggttgaccgtacgggtcgggcttgcattgcggggcagcatggttaaaccgatataatccttctcagccttcaattgcgcacgcagttctgcatagcgcttgacggtttcagcctttttcttgtctcttgcgatccagctcttcttagccataagttcggcggaataagtagagggacggggatgaaaaatcaagcgctttttttcgattttatcaaattcaagccgttttcaatgtcatccgacctttccggcggtctttgcgcatggaattgaatacctgtttctttcacaaacatatcgcgtgaggaggcatccggaacattcgcaacaggatggaagaagctaatttatttaactcttcctaaccattatctccaacaccccaggaaacatatttgaaagaagttcatgcaaaataccccgctcccagggctcggaggacattttctgaaaatttttctagaaatattccggcatgaaaacggcgatcgggcagggaagctccgtcgtaaaaaacggcccttatctccgtccctgcagtaaatattgaagaaaaaagacatggggagttctgcctacacgcaccgcctgtttcagatccattgcgcaatcaaattcatcatcagggaggacaggaccgggaactgcaccatttacgcagactggcggcggaaccgttcaccggacaggcttcagctgggaatttccgtgagagtatgcaaaaagaacgcaagatatggctatctttatataggaaagcggctgtttcactcctgttccggatgatggccgaagattgccggattcatgaacggaaaccggaaagggccgacattttcagcattttgtacggagtgccgttttccaatgggttccagtaaaaatcccgagtagattccggaaaaagctgtggaagaaatgagcgttgctttccccggtaaggccggttcatctccgcttggaaccgtttcatcaaagcagtctccggcggttccgggaaaaagcccgcggcgaaacatgattttgtcctttcctccggggggggaatggggcatcatgccgccgcacactaatcattgacgtacatgaaaatcgtagttgcatactctggcggccttgacacctccgttcttctgaagtggctcaaggaaaaatataatgccgaaatcatcgcctactgcgcagacgtaggccaggcggaagaactggacggactggaagccaaagccctggcgacgggcgcctccaagtgcttcatcggcgacctcaaggaagacttcgccaccaactacatcttcccgatgatgcaggccaatgccctttacgaaggccgctacctgctgggaacctccatcgcccgcccctgcatttccaaagacatggtggatctggccatccgggaaggcgcggacgccatcgcccacggcgccaccggcaaggggaacgaccaggtacgctttgaactggccgtcaatgccctggccccgaacatcaaggtcatcgccccgtggcgcgatcccgaattccgccagcagttcccgggccgcacggaaatgatcgcctacgcggaatcccacggcatcccgatccggcagtctctgaaaaagccttattccatggaccgcaacctgcttcacatttcctttgaagccgggatgctggaagatacctggtacgacggcaccacccccgccgaccgtgaaatgtacaagctttccgtttccccggaagacgctccggaccaggccgaatacatccagctcctgtatgaaaagggcaatgtcatcggcatccagtacgatggtctcgacgttctgctgaaagaactgggcgtcaccccgaaaggagaacgcgacgggtataccctgctcagccccctgggcgtcatgtacgtgctgaacgccctgggcggcaagcatggcatcggccgcgtggatatcgtagaaaaccgctttgtgggcatgaagagccgcggcatttatgaaactcccggcggcaccatcctgctggcggcccaccgcgatattgaaacaattacaattgaccgggaagtgcaaaaggtgcgcgactccctcatcccggaatacgctacgctggtttacaacggcttctggtttgcaccggaacgcgaggccatccaggccctggtaaccaaatcccaggaaaccgtcaacggggaagtacgcctgaagctttacaagggcaacgtcatgtacgccggacgccgttccccgcagtccctgtattccgaagaaatcgccacgatggaaggcggccacgaggaactgtacaaccagaacgacgcggaagggttcatccacctcaacggattgcgcctgaagcaattcagccgtgtcaacaaaccctacggcaattaagcgcccgtaacggtaccactctttatcaaaccgtccggaaaaggtattccggacggttttttctttgcaataaccttttcttttcctgcgtagtgaccgttatgggatttctttcacacgcatttctggcggctgcattttcgctctctccgtttttggcatccgccgcggccttcaaacccaatatcatttttatttatgcggatgacctgggcatgggcatgctgggctgctatggccaggaaatcgtgaaaacacccaatatcgaccgcctggccagccagggcatcatgttcacccggtgctacagcagccaatattgctgcccggcgcgcgcttccctgcttatgggcgtgcacgacagccactcccattcctacacccagacagcgggagccctggtcatcacggcggaacgggaaggctggtccaatgagcaactggaagagaaagcggcacgggcagtacgcatcaaggccgccgagggagaagtgttcctcccggaattgctgaaaaaggccggatacgtcacgggacagttcggcaagctggaatggggattcaccacctggcacggagaattgaaaagacacggctgggaccgctatgtagggtacatggaccatcagagggcccatggcttttatccctccttcctctggaaagacggtgaacgcctccccctgaaaggcaacacccatgccgacggaggcaaaactccggaagactacagtccggaagccacagaaaaacgaagaggcaacagggaaggcaaagtcacctacgctccggacgtgatgctggaggaaacccttcgtttcatggaggaaaaccggaacaggcccatgtttatctttttttccaccaaccttccccacggcccggtagatattcctccagaagaaaacacgtacgcgggctcccctgccatccgccaggcctatggcaatgccagcggaaccaacagggaatgctccggagcggcagaagaatacgcttccatggtggacaagctggacaggcaggtcggagccatcgtggaccaggtgcgcaagctgggcctggacaagcgcaccattatcattttcagttccgacaacgggcatgaactttactaccgtacggataaaggccgcggccgcgggcccgactgccacggaggcgtcctagacggcaccggggaactgctggatgttttccgcggcagccgcggccgcgttgggccaaacaacgccatggccaatctggccggcctgaaatggaccagccatgaagggggcatccgcgttccccttatcatttcctggcccggcacgctgccccatggaaaggtctgccacagcctggtggccaattacgaccatatggcctctttcgccgatcttgcggggatccgcatgccggaaggcaaagatgccgtttcctatatggatatactgtccggcaactcctccaggcagcgcgattatgtagtcgtggatcacaccgtcatcacgggagacggctggaagcttacgcaaaaacaaaataaaccgttcctctttcacataggcagggatcctgaagaaaggaataatctttcgggaacaaggaaagaccagctggaaaaactccgggccatttacaggaaggaagtgggcagccccagaaaagacaggtgaaaaccggagctggcccggcgtccccctttttccgccgggcgtttttgcaggttgaaacctgaacgttccgcatgtagagttccccggtgaagaacaatcccccctccccccgccagacagcactgaattgcctgaggagctggcatgcaggccgctcctttgcggaaaccctcgtggaccgggaatgttcacgagctgcgcttccaccggcagacaggcatctggtgcaggctttggtcttcagcgtattgcgcaaccagacctggcttgaccacgtcatcggaaccctccggaaaggcaagctggacgtggaagcgcgtcttattctccaactggggttgagccagcttttcctgctgggcatggcggaccacgccgctgtgtatgaaaccgtgaatctcgcgtccgtacgcctgagaggactggtaaacgctatcctgcgcaacgctttgcggcgggagaaaaccattctggaggaccgggaaaaacttccgctttccattcattattccacccccgcatggctggtacagagatggacggaacaaatggggccgcaaatgacccgcgacctgctccgctggaacaataccacaccgcgcctgtatgtgcgcgccaatcctttgatacccatgaaaaatattccggcctccctcgcaccgctggaccgcgcgcccggctggttctccgtggaaggccttctgccgctggaggaaattaaaacaggctccctttacgtggcggacccttccacccgttattccattgatttgctggccccccagcccggagaggagattctggacgcctgcgccgcccccggcggcaaatccgcagccatcatcgccgctaccagaggcaaagccctcctgaccgccacggatctccatgaacaccggctacccaccctgaaggaaaacctggacaggcagggatcccccttcgtcaggacggcgcaggcggactggtcccttccctgccgcacggaatggaagggccgctttgacgccgtgcttctggacgttccctgttccaacaccggagtcatccaacgccgcgtggatgtgcgctggcgcctgactccggaagaaatccgccgcctggccgcgctccagaagaccatcctggaaaatgcctcccacgccgtcaagccgggcggcagactggtttattccacctgttccattgacgcggaggaagacgggctgctggtcagggactttctgcagaaccatccggaatggacgctgaaagaagaaaaacttatccttccccacgaggaaaaatcggacggcgcgtatgcggcccttttgatctatgcttgacctcggcttcaatttgtcaacaatgcgtgttcctgattaatatcattccattatgtcccgcaaacccatcattgccgccaactggaagatgaacatcggccccgctgaaggcgcccagttcatcgaaagcttcaaaaaccttattaacgggaaagacgtcgcgtgcgacgtagtcatcatccctcctttcaccaccattccctccgtgcagaacgccctgggcggttgctcctgcatcgccgccggagcccagaacgtctcccagtacgacaacggagcctacactggggaaatctccaccagcatgctgaatgaactggggctcaagtatgtggtgctcggccacagcgaacgccgccaatatttcggagaaacggatgccatcatcaacgccaaaatcaagaaggccatcgccgcaggcattacccccattttctgcatcggcgaaacgaaggacgaacgcctgggaggcattttggaacctgtgctggaaatccaactcaagggcggcctcaaggatctcaccccggaggaggtatccaacctggtcatcgcctatgaacccgtctgggccatcggaaccggcctgaccgcaacttccaaggaagctcaggaagcccattcctttatccgcaaggttatttccgacgtcttcggagcagacgccgccgccaaggtgcgcatccagtacggcggctccgtaaaaccggaaaatgtggaggaactcatggcccagccggacattgacggggctctggtgggcggcgcttccctgaagccagaatccttcgctgctctggtaacttccgccaaataagcggaatccggctccaccctttctacaggccggtccttcacgggaccggcctttttcatctccggagcaccggcctcgctcttttcacccaagagcgcagtttctgccttttcaagcagcctaaatcgtgcataatggcgggaaatcatgaaaacccgcttacttaccccacgcagcaaaggtttcacactcattgaagttctcgtagtcatcgccatcattgccctgctggcaggcgtctcctacagcatttattcccatgccacggaaacggcggccaggacacgctgcacggacaacctgcgccgcattagcgactggggcaaggaattcgcaggccagaacggcggaaaactaccctccagcggcatgaaagacagcctcctgagcgccagggaatgccggaactggtgggacgcactggcgcccatcgttaatgcggaacaacccgacttgatcgcccggaacgccaaggaacccaacatgctcccggacacgttccgctgcaaaaacgacaagcgtccggaaatccttggagcggaggatgccaaccttcccgccgggccgaacaccatttcctacaccagctggctggacaaccggaagggacgtcccatgaatgtggcgcgcggccaggccctgcggggcaaaccctggatcagcgacggcatcccgattgacgggcgcagcgtcatcacggaacaggattttgaggaaatcgtagtcccggcccttgaacgccaccagggaggaatcatggtgctttatgcggacgggaaaatatcccccgttgaggaccctacgcttaacaaagtcacccaaggttcctgaaccccttgtttctccgcccggcgcgggagggaagctgccggaccattgccggcaatccagtggaattttcttcccactcccactgattcgcctttacgaaaccgggataatcattaaggttagcgtccagatgaaccagcatgctcccttcctgcatccgtacgatggaatgataccactgtctgtggcggggtatatcctgggaaccgttctgctgctggcccacctgtatgcgctggtaaaaaggcagcaggtgcaggcttttctgctggcgtctccgcgcaaccacctgctggctcagattctgctggccggcggcctgttctggttctttctgctggtggctcccgaaggattgggcgtgctgagccgctttcgggtggggctggcggaatttgaaggtatccgctggctgctccagctggcatgccccgtctttctggtgctgatggtcacgcaggtgaaaaacctgctctttccacgggcgctgggcatcttcggcctgatggtggcggctcccctcctcagtgccgccttccttcaggagccagtgaccaggctccttattcccatctggtgttacatcgtcattttcctttcgattctctggataggcaagccctacctgtaccgcgacatggtcaataaaatatgctccaagcctgcttggtggacgcctctttgcctgggaggaatggcctatggagcagccattctgctttgcgccatcctgtggtggtagggagaccgccccctccggcacgcttcatcacgcagaaaagacattcagccgcaggagaaagcctccggcaaaaacaggcatacgcaggacggatttttccggaacggcctgttttttcctcctgctgcaagaatcaatagcggttccgcttattatatatgatattccatattcctttcatgtgctctaccctgcgttcctccatcctggccagcatagccttctggttgcttacccttgccccttcactggcggacaggcccaatatcgtccttatcctggctgatgacatgggatggtccgacccgggctgctacggttcggaaatacccactccagccctggatactctggccagacaggggatgctggcaacccggctctacaccacttcccgctgttcaccctcccgggcctccatcatgaccggctgcgaacctcacaaggtggacgtagggctcctggatgacgacagcgggcaccccggctaccgcggacgcctgaacccgggtatccccaccctgccggaacttctgaaaaaagcgggataccgtacctatctttccgggaaatggcatcttggaaaagttcggggatcctacccatgggaccgcggcttcgaccgttcccgcggtttgctgggtggagcggcagattactacaggcccatgccggacagacccttcggtgaaaacgggaaactgctccgtccggaggatctgccggaggatttttacatgacggacgatatcaccaaaacggctctggcctatattgacgatgccgccaaaagcaggcagcccttcttcctttacgtggcttatacggctccgcatacacccctccaggccccccggagggaaatagaaaaaatgctcccgttctacaacggcaaatccccccatgccattgcttccaaaagactggaaaaacaaaagctgctgggaatcgtccctcctacagccaaactgggcatggccggcaaattcaatccagaaggctatgaaaaaacttccgcaaagcggaaggattatattgccgaatgcatggccgcctacgccgctcaaatcgctatcatggaccgcggcataggccgcattctcgcgtccctggaacgtcaccgcctcagtgacaatactatcgtcatgtttttatcagacaatggcgcaacagcggaaatgccccagaacaataaaaacaagaagactaccctccccacaggcccactgggagaagtcggatgcagggacggatacggccccatgtgggcggctgtgtccaataccccttaccgccagtataaaatagaaacctttgacggagggctgtccgcccccttcatcattcgctacccttccaaaatacgtccgggatcgcgctaccactcgcctttcctgctccaggacatcgccccaacctgccttgcgtgggccgctctcccaattccggcccatatggacggcaagccgctcaacacctactggaataatcctccgaaacttcctccgtccaaggtgtgggacttcattcccaatacctgccctccccgcactatcttctgggaacatcagagaaaccaggcggccctgacaagtcaattcaagctggtggcccccaaccgaggcccctggcaggtgtacgacatcagggacaggacggaacagaaaaatctggcatccaggcaccagacgcttgtagaacaattgtccgcgcagtacaggaaatgggcggcggaaaaccatgccgaatgacacggcacggcaggaaaacgggcatacgcgccctaaacgtttctatgggaatccccttccggaagaaaattctgatttccgtttcctcaagtaacagaaaacggcacgtgattcaccgggaaagaaaaagcagggaataacagttattcccgtccgcggcaacattcctgcctcccgggcattccgggaaccattcattattttcacactctttgccatcctttcccatgaaggggaattgcataaaaatccgcttcttcattcggatttttcctatgccctattttttgccctgtaatcaaaaataattcctttataaggttaaaactagacaaaacaccgctgtttatcaaatcatttcccaaaaggaaaactcttcttttttcctaacaattattggaataaaagaatccttatcattcaaagaaataccgtattagaatacttctaaattagcaaaaaactcattgattgtaaataaacttaatttaaaatgccataagaaaaaacctttctgcaccttacctccgttctgtactgccgtcacaccagatatggaatatttttgataatcaattcataacatacctttaacaaaacttgcacagcgtctttttatgttcaaagagccctctttcctcaaaaaagcaaatctgttccagcctattctggttgtcgtgatctccatcatcggagggactcccatggaaggagccaatacggggaaaatagtccttttgatcattctgggcgccgctttcattgtatggcatgtggaatgccagagactgctcaacaggaaccgggaaaccagggagcatgcctgcgccctgaaaaaccgcagtgcggctctttacaaaaaaacttacgccgccctgagcggagaatacgaaaacttcgccaataaactgaatggagaaagttgccgggaggcaaaaacggacggttcaagggggacgacggaaagcttcaacggggcctgcctgttcctgtgctccaccattgccgctgcgctggctgaatataaaaactcccttgtctttgaagtgctttatattcaggcagagcagcggaaagaccaaaccttgctgcacgttacaggctacgcacagggagaacacaataacgacaccccttccctgctggcacagcctccgcggcccgtaacgaaaacacccgccatgctggatgaacaattattcgcggaacaccacctcagccccctggttctttccagcccggaagaagtgcagcgcagctttttccggaagcgcaaccagcctccagaggaaaaatacatgcagtatctggccattcccgtcctgagcaagagaaatgaaatcatcgggcttatcgaaatcgccgttaaaaagaatccgttcatttcgcccgtcaccatgctggaagctcatgaattggccgacgttaaatcatggctgtaccatttaaaggaccatttcctgttgtttcatgaaatagaacgcgccgtccgggatggattcccatgacggcagtacgagcagaatagcctgctacgcccggggccatattccttaaaaatttcctggaatatatattctggcatatttacaatcaactacttctatctttttaaccagaacggttaccgccatataatgctattaacctgtaagtgaaacagatagcacttgggtcattttctgcatctgaaacaagaaagaaaaaaccctgtaaactattgggtctacagggtttcaaaaaaggaatggtacttggaccgggactcgaacccgggaccaatagattaaaagtctactgctctaccaactgagctacccaagcacttacccttgcaggaagggcgcaagcagtaaacaccacaccccctttcatggcaagcgtaaaatggaagatggacaaaaaaagatcaggattccatgcattccagccatctcgcacgccattcggcaggaatacgcgcagggcggccctgcggcatctggaccaaggccagctgctgatgagccctgaccagaagatcattattggaagcgcgccgcatttcaaaatcgcaccagaaacgggcccggtccacggattgaagccatcccgtcgtcaaaatggtatctcccagaacggccggacgcacatagtcaatctcatggcgcaccaccacggcaaactgctgcaaatcgctcatggttttgtaatccattcccaatttagcgccaagtttggtacggcaggcctcaatcatgcgcaaataggccaagttatggactactccgccacagtccgtatcataaaacatgacttcatcttccgtatgaaacatcagctccggattcatgcctgccattgtaaaaaggaaacaggcgggctgaaagaaaattccggttcagccgcgccatgcatgatgcgtccgcgccagcgtcagcacgcaaacggaagcagccccggcgcggaggagcagacgggcgcaggaatctgccgtggctccggtcgtaaaaacatcatccaccagcagcacatccctgcccctgacggggctgcgtttcatccttttttcatccgctgcataaattttacgggcatgtctgagccgctgctcccgcgacaagctggcctggggaagcgtatccggcaggcgtttcagcacgccggcatacggccagcccagttcctctcccagtaaaaccgccagttcctgcgcctggttgtacccccttcgagcctgtttgccgcggtgcatgggcacgggaacgagcaggcgttttttcccgccgaaccagtgaggatttccacgcactgcctctgccatcatctgcgcgaaggagccggccagatgaacagctcccccatatttgaaagccagcagaagagcccgcaatgatcccgtattcacatacacggcacgggcttcctcaaaagaggggagaaacgccgcgcagcggcggcataatccggacgggatgaaggaaccctccgccggttccccgcagacggcacaaaagggaggctcgataggcacgaaacttccgcggcagtccgggcagacatggcagccatccaggccgccgcgcccgcacaactcgcagacaaaaggatacacccaggaaagccattccctggcaaccgccctcagcattccccgcacggcagaaagttgaaagaggctcctatcgtccgtctctcccatcggggaagtcggcgtcctcctcttccggcatctcttccagaagcttgtctatggtttcaatgaaacgccatgggcaccgcttgcgctggtatttacgccacagcacatcgcgcagagtcacccagtgagcccgcgtcaattccacacgttcccattccacatcgtcacgttccgcacggcccaccttgggggcgcactccagcttccatttgccggcatggtggcacgccttgtacaccagggttccctcttccgtgcgttctttccacgtgtgaacttccatggaggcgagtgtaaggaagaagcgttccgggtaaagaggaatttttctagtcatccgtccttgcgcgattaatatggctccgtcatgaacgacactgaaatgatcgaatgccgcgagcctgcccttcaaatgcagcgcctcatcgccatcatgaaacgtctgcgcgccccccacggctgcccctgggacgcggaacaaacccaccattccctgatttccaatatgattgaggaagcctatgaagtcgtggacaccattcagcggaatgactggacgcagctgagggaagaattgggcgatgttttgcttcaagtggtttttcatgcggagattgcccaggaagcagggcgtttcgatttcaatgacgtggctgcggaagtaagcgaaaaactcgtccgccgccatccccatgtatttgcccagtccaaggcggacacgacggatgccgtattagctcagtgggacaagatcaaacgccgggaaaagggggcggaaacaaccccatacctgcatggaacaggcaaggggctgccgcccatgctccaggcatggaagctccagaaaaaagccgccaaagtaggatttgactgggcggacgcccaaggcgcccttgacaaggtgaaggaagaaaccgcggaatgcggggaaattctttccgcaccggaggaagacccccgcgtcgcggaagaattgggggatctgctgttttccgtagtcaacctgtgcaggaaaaagggaatcgacccggaaacggccatggccggagcaaacagaaaattcgagcggcgtttcaacgaaatggaacggctgcttgccaaagacggtctttccctggaagaagcttctgcggatgccatggaggcacgctggcagcaggcaaaatccgcccggtaacgaaagccggggtcaggccatcatgtccatgttcgggtctttccaggccggatcatatcccttggcatagctgaacacatgcttgtgcatgtattcgaagtactgctctttctgcatgggggtaagccgttcccagatggctacattcaaggcgcggcacaccttctgcatcattttcagggtaagctggcgcccctgccgggctttttgaacctgcttgtgggtaagctgctccggagaaatttccaccaggtcgtgattagtcagatgccagcgcttcatcagttcatccaaaggctgttctccgtggttgcgtccggttgctgtggcttcctcgtccatacgcctttcttcgtgccctatttccgggaaataggcaatacatgattgccccatcagcactttttttgcatttccagttgcccggcgtccggatacatggttcaatcccgccccgttgcaataagatgattagcgagaaagaggaattactggaatggcgcaaacgcgccgccgcacagcccgcggggcgggtagtcctggatctggaggcagacagcctgcaccgctatcaggaaaaaatctgcctgatccaatacgcggacgaaacgggttcctgcctgatcgaccctctctccatcgaagacatggggcctttctacaactggctgaaagaaacggaagtctggatgcacggagcggactacgatatgagcctctttcaaaacgcctgggaaacgctgcccgccatgatctgggatacgcaggcggcggcgcgcctgctgggcttccgccagttcgggctggcagccctggtggaacacttccacggcatcaccctgagcaaatcctcccaaaaggcggactgggcgcggcgacccctttccccgaccatggtcacctacgccctgaacgacgtaaattacatgctggacatggcggacaaactgacggcagccctccgggaaaaaggccgcatgggctggtttgaagaaatttgcagacacttcatggaacgcgcccgggaacgccatctggccggacatcaggatccctggcgcatccagggctgcggaaaactgaacaggaaggggctggccgccctccgggaaatgtggacctggcgcgatgcggaagccaaaacgtgggacaagcccgcattcatggtttgctccaatgctgacctcatccagtggagcgtggctcttcaggagcagcgcaccgtggctcccccgccccgttttcatgcccacaggcgcagccggttcatgaatgcgctccagaaattctacctgctggatgaagaagactacccatgccggccccgcatccagcgccgacagcattccgaccaatttgaagacaatctggcccgcctgtgcaaactcagggatgaaaaagctgaagagctgggcatggaaggctccttcctgattacccgggcctctctggaagccattgcggaagacaaggaaaaaggaatttccaccctgttgaactggcaaagggaagccctgggtttttaagcggtttttttgcaacggcaaaacacccgaccggaagagccatggctcaaaagggtctttgcccttcatcccggacggccaatacaatcctcatccctgaacaccctggctttctgaaggctttctccgctcagggagaacaggcaagggacgaacactcttccccccgcaaacgccgttttcccctgcctgcctatttacattgagcggaagacagttttttctataatgcagggcagttcccttcctccatgccctccaaccgccattcatacatggtcctggcaatcgtctgcgtctgcgcccttgccatatgcgccttcctttcctggcagaaccgggagaaaaaaaaccggctggcgcagcagtacgcggaattttccatgccgcagaccttgaagggaagcacgccggcacaacagaaagccctgcttgaaatactcagcggagaacagaaaaatatttctcagacttccccgcaccgtcaacaggcggcagaacctccgccccggagccgagaaaaaatcttttcccccccggcagggcatgctagggtggcaggcgatgaatcatgccgatttagaccagttgctgatccttcaggaaaaggatgtgcggatttccaaactccggaaggagctggcttccctgccggaacagagaacgcgcctgctgaaacagatggaggccatcaagcagaaggccctggccgccaaacaggaagtggcaggcattgaaaaaagcatacgggacgtggaggccgccgttgaaaccaaacgcgcctacatcggcaaaatgaaaaccctccagtccaacacccggaaaaacgaggaataccagaggtgcatccaggaggtggaaaaaacggaagccgctattgactctctggaaacctcagagctggaattgatggagcgcctggaaacagcaaaaacggacatggagcagaaaatccgccgtgcacgggacgcccagcacgaactggaggaaacgctcgcgcgctttgaccggacggcagagacggacaaggagctcctgaaccgtttgaatgcggaacgcgcggatctggccgccgccgttccggaagattccctgggggaatatgaacggatgaccagaagcaagggtgttccggtcattgtgcccatggatgaaaaaggccattgcggcggctgccacatggttatcacggacaacacccgaatgaaagtgctgggcggccacgaaaccgtttactgcgacagttgccaccgcatcctccactgaaggagtttccaggaacgccgccgggcttgccatgaaatccagatcggaagaatttgaagagtgggggacggaagtcatcttcggccgtgccaagggattccgcgccgccatgatgcgcgtggtcctgcgcggtgcctcctggctgttcaggctggtggttctggcacggctgtatctgtttcattccagcatcgccaggcaggccaggctgggaatgctggtggtcagcgtgggcaacatcactgtgggaggaaccggaaaaaccccggtggtggaactgctggcccgcaccctcaccctccgcggccgtaaagtagccatcctgacacgcggctacaaaagcgcagagctggataagcctcaggaatggagagacaaggacggcaggctgccggagaatcttcccaagatcgccagcgacggaaaaacgcgctacctgagccccctgtattccggtgatgaacctttcatgctcgccaaaaatctggacggcgtggcggtgctggtggataaaaaccgcatcaagtccggcatcttcgccattgagcacctggggtgcgacaccctgttgctggacgacggcatgcaatatttgaagctggcgcatgaactggatatcgtgctggtggattgcggcgcgccttttggcaccggagccatgctcccgcgcggcaccctgcgggaacccaggagcagtttggcgcgcgccagctacatcattctgaccaaatgcggcgggaaaccacaggatgagctgatctccgccatcaggaagtacaatcccgtggcggacatcatcgtgagtgaccacggcccccggtatctggaaaatgtgttcacgggggaacgccttcctctgaaggccctccgggggaaatgggtggcgtgcctcagcggcatcgcgcgcccggaaagttttgaaaactccctgcgctccctgggcgcccacgtggaaatctgccgcaggtttccagaccaccactggtttgaacaaacggaattgcaggaattttacgaccgctgcgcagaccgggccatggacatgatcgtaactacggagaaggatgccgtgcggctggaaaaaccggaggaagacccggaggtccctatctatttcctgcgtattgaagtggaaatctaccagggccgggaggcatgggaacgttgtgtggaccgcatctgcggaatttcagaaccgcgcccacgggatgaatggcaaccttcctcatctttctgagcaagagcgcagcagcttgaggcaatacatcaagaaaatcgtgaacatgcgttgccctttttcttgaaaagaagtatctaaaatgttcctgaaatgagcatcaaaaaattaaaaccattcatcacagcggtcggcgtcatgcttctgctcgcggcagttacaatgggttatttttccgctcaaaggctgtcttccatcattccggcgtccggttacgaagataaaggcgtttattccttcgtacctgtccgggtgcttcctgttcaagtggaaaataccggcgcaaccggaagagcccgccgcatgaaccccaccaaaaccgtttacatggtccactaccgtgataccggcagaaaaggctatcagtggaaattccaggcggctacccatgaaacgggacaaaaaatcgtgaatcagagaatcgccgtagagcggcgcgtgctgagcatccctgccgacaaccattcctatatcaccatagaatcggaagagactgcagaaagctatacagcagaacttcggcaaaagaatataatgatcctggccttctcaggaatctacattctgctctatgcggcaacatggggcgtcattcttatgaaaaggtccagaaaagagtcccccgcggcctgaaatgaaaaaggcagtttcctcgaaaatgcggtctttacgcccttctgacgggaatgcggcagaaccttgacggcgaacggcatggaaccaatcgcacatttattggaatctgccggcgggtatgccactccataagcgaagaatcccgctttttcattgtcgccgttcacatcctgtcatgaccgcctgcatgcggaaagaatgacatttcccgaaagtctgcggaaatccgccgcttttatgcagagaaggccgcttgacttgcccggaaaatcgtgtgaaacaaaaaggcagtattttcccatgaaggcatttaccatcacctccattctggctgctgcgtgcctgtttccgtcctattcgccggccggagccgcagcagaaaacaagattcaggctgcctcaatgcaaacggcggcaggcattcccaagcaggacccccagcttatcaaggggaaactcgccaacggcctgacctacttcatccgcccgaatgcggaacccaagggccggttcagcatccgcctgcgcgtcaacacgggttctctgaatgaaacggatgacatccagggcgtttcccacttcctggaacacatggttttcaacggaagcacccatttcaagcgcggggaaatgattcccgccatgcagaaagaaggcctgggcctgggaggggacgcaaatgcgtacaccgcctttgacgaaaccgtgtacatgatggacgtgcccagcatgaaggaatccaccgtggacctggctttcaccatcatgcgggattttgcggacggagccctgctggaaaaaagcgccattgacgcggaacgcggcatcatcaccagcgaatacaaggtgcgtgactccgccggttaccgggtcatgaaggaagtcttctccatcatgctggacggaacccgcattcccgaccgctatcccatcggcacgctggaagtaatccgcaccgcgccgcgggaaaaatttatcaactattatcggactcactacgtacccagccaaatgcagctcgtcatcgccggggacatcacaccggaacagggaaaagcctgggtggaaaagtattttggctccatgaagaaggacaactactccttccagacggaccggggcacgcttaaaacggctacggaaaccaccgcccactggattaccaacaaagaggccaccagcacggaagccagcatcaacatcgcccgcccctacgtgaacaagccggataccgtcgccaaccgcaacaaagatatccccttgaatgtggcttacgccatgctgaaccgccgtctggaaaagatggcgaagaatgcggattgcccctttatctccgcggaaggaggccgcgcggacatagtggaagcggcggaagtggattccattcagacccaggcggactacaagaattggaaagcggctctggccgccattgaacaggaactgcgccgggccattgaattcggattcaacaaggaagaactggcggaggcccgcagtaacattaccgccgccgcggaaaacgccatcaagtcctgggctaccgccaagtcggaagacctggcttccgccatcgcccagagcgccgcacgggacaaggtcttcaccacgccgcaggaagactgggccatctccagggaagttgtggaaaacctgacacccgaacaatgccaggcagccctgaaggaagcctggaccggagcctttccccgcgtgatcgtcacttccaataaggaaaactcccagggaagcgccgaaatcatgaaagcgtaccgggaatcccagaccgctaaagtacagccctaccaggcggacggccgcaaggatttttcctataagttcggggatcccggcaaggtgatggcccgtacggaaaccaccgacctgggagtcacccagctcaccctgtccaacggcgtgcgcgtcaacctgaagcccacggaatttgacaaggactccatcaacatcacctttgccgtggacggaggggaactgagcaggccggaaaaagcctccgggctggaactttttgcgaatgccgtcatgaacggcggcggtttgaaagaccactccaatgacgaactggccgccatcatggcaggcaagaaggtaggggtaggcttctccatgacggaccgcttcttcctgctttccggaaacaccaacagggaagacctggaaacgcaactccagctccagacggcctacctgatgcacccaggttaccgccaggacggcgttaccctgctccggcgggccattcccatgatttataacaagatggaccatgaagtgcagggagccatgaagaagcaggttccgtccatcctttacaggaacaatccccggttcaccttccccactcaggaacagcttacctcctaccaggtcaaggacgtgcgggactgggtggatgccccgttgaaaaacaactacatggaagtgaccgttacgggagacttcaggacggaagacatcatccccctgctggaacgcaccgtaggcgcagttcccaaacgtgcggaagctccggcaacgctggatgaaacgcttcgccatccggccatggcggacttcaatttctccaaggacctgacctatgactcctccattgataaaacgatggtctgccttttctggaaaacgcccggcggagaaaataaaaagctggcccgcaggctgaacatgctcaaggcagttttctatgaccgcgtattcaagggcttgcgcgaagacatgggggaaacctactccccttccaccggcctcaatatcagtgaaacctatccggacgacggctatattatcacgatgagttccggcgtcatgcgcaataaggaggctgtgcgcagcgccatcgccagaattgcggacgacctcggcaagggaaatatcacccaggaggaactggaccgtgcccgtaatcccattcttaactccatggaccgcgcccagcgcgacaacggctactggacatccctgctgaaagattcccaggccaggccggaacggctgaaccagcagagggaaagcattccggacgtaaaagccatcaccgtggaagaggtcaacaaacttgccaaagacatcttcggcaagggagagcatctcaacctgaacattctgccggatcacccggctgcggaaactccgcctgctgaaaagcaggcggacaaagccgactctccccaagccgccgtctctccggcggctttttgcgttcgcaccaccgtcgtaaagactgtcaacaaagactccggcaagaacggatatgccatcgttatttccgaaaaaacagccgctatgccggactggaaggccgtagcggacaaactggctgaaaaacacggaggcaccatcgtcaccgtgaaggattccgtattctccaggctggacacgcttaaaaaaatggctccccgcttcatggccgtcgtcgcgcgcccggaggaaatagaccgggtgctggtgaatgacctgcaccgcctgagccgccggctggacgacgacccttacggagactgtatctggggcattgtcacaggatacaccccccaggccgccatgagaatagcctctgcaacgaagcctctcgtcatcagccgcgccatgggaacaaccaatgtggattcctcccgattcaaagacagcatgagcatcacggactggcagcccttccaatacctggaacagcatggttccaagggcaaggtgacgccggctttctacacgaaaggcctgaaagaacaggacaagggggatgaaaccacgctgggcgtaacgcccaagcttatggaatactggaaacgttattccccgcagctcttcgtaacggcctcccacgcaacccagtttaatctggaaatgcctttcggcaagggactcatcgtttccggcaacaaccggttctacgcgctggacaaaaaacagttcagggaattcaccacttttttgcgcggcgtactcttcaatggaaaggaagacgaccttctctccttccttaagagaattaaagcgccggtgattgaaaccaggccggttccggctgtctgggtcgcagcggggaactgcttgatcggagatgccaagaagacgaaaaattccatggctgtcaccgccctgagccgctacggcttcaaccagctggtaggctacaccgtcccttcctggtatggcaagggcggctgggggacgctgggccttctgttcagcaatcatgacgcctccagcctggcggaagcctggtatttgaacaaccagttcattctggacgagaccatgacccgcttccccaagctcatggacgtccatttcaactccccggatatcaatggaatcaaggatgatccggactttgccaggggcatgaactccgccggatacggcatgggcaaggatcagctggggcttatccacgaccgggataccgtggccttttacggagaccctgcctggacggcgcgtcttgacgaatcccgagctccgtccccgtggcatatcgactggaatgacccggcagatgcctccaaagggttcaccgtcacagccaacaaagacgccaaaggtcgcctgggagtctggttccccaaccgaatcaacgccggcaaggccaccgtcatcattggtggaaccgccactcccattgaaaaggcaggcctgctgaccaacgacttccttctgctccgggaactggaactcaaaaagggagaaaaagccgtcgtggaaatgaaataagtgtggcagaaaaacaaattgcaggaatttttccccttccgtcggcggccaaatatccggccgccgctctttttccatagacaagcagcctccaaacatggatactcccgataatcaatccaccctatgactgattactccattttctttatcatcgccgtagtagcgacgggcgtgggagcgctcctgtttctcctgtccctgttcgggctgggggaacatgatctggactttgatgcggattccggcggagcggacgtagggttgctgtccatcaaatccggcatcggcttttttctgggcttcggctggggcggcgtgctcgcccagggtctggactggggaatggccgcttccctggcggcggcttttttcaccggcgtgctgatgttcctgatcatcggcatctccatgcgtttcattatgagccttaaatcagacggcaccctgaattatgaaaccctcaagggaatgaccggctccgtttacatcagcattcccggaaacctccaacgcggcggacaagttacaatcgcccatcccagccagctgctgtacctccctgccgttcaggaaggggaacatcccctgccctccggaaccccggtggaagtggtagccgtcactgcgggaatcgtcaccgtcaaacctcttcattaacaaacaccccaatcatcataccccaagacgactatggacaaaatcatccccatcgccattctggttctcttcatcattctgaccgcttcctggctgttcagccgctaccgcatgtgccctccggacaaaatcctcatcgtcttcgggaaagtaggcacaggccagccggccaaatgttaccacggcggctccaccttcgtgcttccggttctccagtcctatagctacctggatctaaaccctatcaatattgacgtgcccctccaaggagccctttcctctcagaacatacgcgtggatgtaccctcctccttcatcgtgggcatctccacccttcctgaaatcatgcagaacgccgctgcgcgcctgctgggccgttcccgggaagaaatccgcaacctggccgcggaaatcatcatggggcagatgcgcgtggtgattgcctccatgaccattgaggaaatcaactccgaccgcgaaaaactcatcaagggcatcacggaaggcgtggacgtggaactgcacaaagtgggcctccatctcatcaacgccaatatcacggacatccaggacgcttccggctacatcaacgccctgggcaaggaagccgctgcgcgcgccatcaatgacgccaccatcaaagtggcggaagaaacgcgccgcggggaaatcggcaaagcggaagcggaaaaggaccagaccatccaggtggcgaacgcccgcgccatcgccattgaaggccagaacgaagcccagattaaaattgcggaatccgccgccaagctgcaagtgaagcaggcggaggccaaaaagctggcggaagtggcccagaaggtgcaggaggctaaaaccctggaagaagcctaccaggcggaaaaagaagcggaattaaagcgcgcggaacgcgaacgcgccacgcaggaagccaacatcctggtaacggcccgcattgaaaagagccagcgcgaagtgcaggcccaggccacggcggaagtactcaaactggaacaggaaggcaaggcgcaggctctgctcatccagcgcagggcggaagcggaagccatccgccaactggcggatggcgaagcccaggctaccctcctgaagaaaaaggcggaaggggaaggcatggaaatggtgggacgcggtgaagcggccgcgattgaagccgtgctggaaggcaaggcccgcggttttcagcagatcgtccaggcggcaggttcttccgaggccgcttccaacctgctggtgacggaacagcttaccaagattgtggagctccagtccggtgccattaaggggttgaaattcgacaaggtagtcgtcatgggcaatggagggaactcctctgtgggaggattcgtccagaatctggtaacggatacgctgccccttcatgaactcggcaaaagcgtagggctggaattgcccgcttttctgggcaaacccatggaagggaaaaccgcagcttcctcccctgctcccgcagccgatgccccggcggcagataccgcaaccaccgtcaacccgagttaacccctccatccccgccttcctgacggcaaccgccccgccacccagggaagcttccgaacggtgttccgggaattcccatggcagggaggagcggccgcctgacaacctctcccgtagccgcacagtcgaaacaagcggcataccgcattccgatcatagagaataagccggacatgccggtgaacccgcaggacagggaggcactagacagccttgttcatattgacgctggacgcatgccgcagcggaaaagcccacttaccgccagaaggtaaacagagtttgaaacatgaaaagagaatccgaatgcctgccttcaaacctaacgggcagatggcgaaacgccatattgattcattatccgtcattgagtattgttgattttccctgctcatggtacatatccgggcacgcatgagtgttctgcttcatatctgctgtgcgccctgttccatttcctgcattgaaatgctgcgggaagaaggaatggaaccaaccggattctggtttaatccaaatattcatccgtataaggaataccaggccagaaaggatacgctggtcgaatacgcggcaaaaatcggtctgaaattgattatgagggatgaatatggactgcggcccttcattcgcgccatttacccctccctggaaaaccgttgcggaacgtgttacaggatacgttttgaagagactgcacggtttgccgcagaaaacggggtcgacggcttttcttcaaccctgttcgtcagcccttaccagaatcatgaattactgagaaagaccgctgaaaaaacggcagagaaatttggaacccgtttcatttaccgtgatttccgccccggtttcagagaaggtcagcaaaaggccagggaactccggctgtacatgcagaagtattgcggatgcgtcttcagcgaagaggaacgttacctgaaaaagaaataactccattttaccaggcttttgccttttccccatgaccctgcagcagctaaaatatatcatcggcatcgtcaacagcggttccatcaatgaggctgccaaacggcttttcatatcccaacccagcttgtccaaagcggtccgggaactggaaaatgaattgaattttgagatcttccgccgttcttccaagggcatttccctgtctttggaagggacggaattcctttcctacgcgcgccaagttgtggaacaggcggaacttctggaacagcgttacctgaatacaaaacctctcaaacgccaattttccatctcgactcagcactacgctttcgccgtcaatgctttcgtcaatctcatcaaaaaactgaacatccaggagtacgaatggacactgagagaaacgagaaccttcgagatcattgaagatgtccatcaatcccggagcgacctgggtatcctgtatctgaatgatttcaacaggcaggttatcagcaagcttctcaaaaagaacgatctctgtttccatccccttttccgggcagaaccgcacgtctttgtcagttcggcacatcccctggcgcgccgcaggcaggttttactggaagatctggaagattacccctgcctcagttttgagcagggaacctataattccttttatttttcagaagaaattctcagcaccatcgttcacaggaaggaaatccatgtcagcgaccgggcgaccttgttcaatcttctgatagggctgaacggctataccatctgttccggagttctcagcgaggatttgaacggctcgaacattatttccataccgctcaaaaccaaggaatacatgctggtcggatggattgacagggaacaatcccgcccaagccgttcagcccttctatatatagaagagctgaaacgggttatcaccgaatacggctatgaagtaatccggactgacgattaattccggatgatggaggcggtagcttcgcaaatacggccggcgacatacgggttattcatcgtatacaggtgaatgccatctactccttgcgctacgagatcgataatctgctcgacggcgtaggcgatgccggcatcccgcattgcgatggggttatgctcaaacctttccatcatacgtataaatttcttcggcaaatggacatggcacagggaaaccatcctctctatctgctttttattgacgacgggcatgattcccgcttcaagagggacggaaatgcctgccagatccagtttttcccggtaggcgtgaaaaatatcgttgccaaagaacaactgtgaaatgagatggtccgctccggcctccaccttggtcttgaggtggcgaatatcatcgactatgctttttgattcgggatggccttccggatagcaggccgccagaatgtgaaaatttccctgttccttaataaaggaaatgagatcgctggcataggtgaaatcacggcacggttctctgtccgggggcaaatcaccgcgaagggccaggatattttcaattccgttccggcggaactgttccagaagctccaacacatttcccttcgtcaagctgatgcagggaagatgggctacgctctcaaccatataatccttcttgatggaggaggcgatgttaagcgtatcgctggttcccgcgcctcccgaagcaccataggtcacgctgataaaatccgggttcaatccctgcaaagcgctcagagcatggtaaaccgtcccgatcggggaagtccgcttgggaggaaacacctcaaaggaaagaaccctcttttggggaaacaattcggaaagcttcatgactggaattccgtacgcagggctctggccgccgccgtcatatttttgaggctgcctatcgtttcctcattgccgcgcgtctttaacccgcaatcgggattgacccacagtttttccggtaaaatcttccgtagcatgcgatggagattttccataatttccgtctctccgggaatacggggcgaatggatatcataaactccggggccgatttcagtcttaaacccgcattctttcaaggcatcgagaatgtccagattggaacgggaagcttcgaatgtgatgacatcggcatccatggaatcgatttcccggataatagccgcaaattcgctatagcacatgtgcgtatgaatttgcgtttccggcctgaccccgctatgcacgaggcggaacgagggaatggcccagtccaggtactctccatgccagtcggaacgacgcagaggcaatttttctttcagggctgcttcatctatctggatgatgcctatgccatgctcttccaatgccagcacctccttgcggacagccagagcaatctgcagggcttgctcctccagggaaacgtcttctctggggaaagaccagttcaggatcgtgaccggccccgtcagcatgcccttgaccggtttgtttgtcaggctttgggcatagacggcgtactccacggtaatggggcgcatccaggaaacgtcctcccagacgatgggcggcttgacgcacctggttccgtaggactgtacccaggctttttccgtaaaaaggaagccctgcaggtgctcgccgaagtattccaccatgtcattgcgttcaaattctccatgaacgagaacatccagtcctatcttttcctgcagggaaatgcattctttaatcctgtcaaagttgaattgcctgtactgctccccgcaaatgaggttcttcctgaatgccgcccggttggagcggacttccgcagtctgggggaaggaacctattgtcgtcgtaggaaacaggggaaggcggaaacgggttttctgaagcttttcccgctcttcaaaagacgggaatctcgtaaaatcgtcaggcttcaaggcgaatacttccgcctggacagcagcattttttcctatcctgtccgactgaaacaaagcatcattgacttgataaatcttttctggctccgcgttctccagcgaaaaaagaaagctaaggtcccggagctcctgcagtttttcttcggcaaaagagaagtgtttcaaagcatattccggcagtttcgtctcctgagcgaccgtatagggaacatgcagaagggagcaggaagtccctatgcctatgcgggcacccgtttttttcaaatcggccagcaacgccagagtccgggaataatgattgcgccagatattcttcccgttgacgacgcctgcaagaagaagcttatctttcgggaaaccatattctttcaccagggacagcgactgctttccttccacaaaatccagtcctaccgcatcaatatccaatccggcaacctgttcatagcagtcgcggatatctccgaagtaggtttgaagaaggaccttcacccgcccctttgaaggcagcatggattcatacaagcggagaaacaggtcgatatcctgcctgtccaggtcacggacaagagcgggctcgtccaactgcacccatgccgcgtccagctcatggaaacgggccagaatagcggcatacgcccgggccaactccccggcgacactctcccgcgtgcgtccccccgccaatgaggaaagcgttaagaatgtaaacggcccaatcaggacgggcttcgtttcaatcccgtatgaccgggcttcaaggaattcgtcaaagggtttactcccggaaatctgaaggggggcggaatctatctcgggaaccaggtaatggtaattggtattaaaccattttttcatggctagagccttgacatccccagccggcccctgatagccgcgagccatcgcgaaataagtatccaatgaagaaattcccaaatcccggtaccgctggggaaccgcatttaacaaaaccgcagtatctagcatctggtcgtaaaaagaaaaatcattggaagggatgccgtcaatgcccgcctccatttgtttttgccagtgcgtcctgcgaaggcggcttcccgtctccaacaacgcctccggtgccattttcccccggaaatactgttccacggcaactttgagttcccgtgacgagcctattctgggatatcctgcaactgatgttttcatggtatttttcaatctgtaatgaaatgcaggcttcttatagcaaatagcgttattattcgataatacaattattctatggcataatataacaaaaagctataacaaactactgcttgccaggttcattgacaagaaaccggaagaaggttaggatacggctttcaacctctcttcaaataatgaatatcaaatccgcccttttgacgctcgccgcaacccttgctctctcctcctgcaatacgatcagcggaataggaaaagacgtggaagccatgggaagcaagattgacagcgcctcccaggccaccagcaagtccatgcaataaggcccgggaagtgccggacgctgcttcgaatcctcttttaatgaaaaagaggcagtactttacttcctgccattctgccctgaatggcagccatctccatggggttcccaacgaattggcatggtccggctccatcctgcatggaacacgccaaacctttgcggccatccggaaatcagggcatgcgggcggcagcacattgtttaccggaaagccgcttcatccgggcggatgaagcggctttcgtccaaggtctccacataaccttttacatggcccggctggtggaacgggcggcggaattaatgtcgctgccgaccgcttccacatccttgcccaccccgcctatcgtattgcaggaaacgcaccccagaagggtggcgatactcagaataatcaatttgcttttcatcgttttattggaagagttccgagtaatcagactccattcctccgccccccgttcaaagaaccggcaatcatgccacaaagccccctgtcattctccgttcttgccatgcgttcccaaaacacttaaaaaacatgcgccaaaggaaaaaatgccgggcggacattccgccccattacccggaaccattactatttactaccaagatgattaaagtagccattgtaggatacggcaacatcgggaaatacgctgtggacgccttgcgcgccgctcccgatatggaactggcaggtatcgtgcgccgccccggcagcgaagctgtacacggcatcaagaccgtaagcgacgtggaggaactgggccatgtggacgcagccctgctctgcacccccacccgcagcgtggaagaaacggccctgcctctgctcgcccgcggcgtcaacacagtagacagctttgatattcacggggacatcgtggcccttcgccgttccctgggagcccaggcaatcaagcatgacgccgtctccatcatttccgccggctgggaccccggaacggactccgtcatccgtaccctgatgctggctatggctcccaaaggcatcacgtacaccaacttcggccccggcatgagcatgggccacagcgtcgtggcgcgttccaaggaaggagtggcggacgctctctccctcaccatccccacgggttccggcgtacaccgccgcatggtttatgtggtgctgaaagaaggcgccaaattctccgacgtggaattcgccattaaatcagattcctacttcagccatgacgacacccgcgtgctgcaggtgcccgacatcgacgtgctgaaagacatgggccacggcgtgctgatggaacgcaagggcgtttccggctccacgcagaaccagatgttcacatttgaaatgcgcatcaacaatccggccctgaccgcccaggtcatggtggcttccgcccgcgccagcatgaaactggccgcaggctgctatacgctgccggaaattgccccgatggattttctgccgggcgaccgcgaagaattgattgcccagctggtctaacccggagcattccggacacacggtatcaggggcgctcctgccgcccctgttctgcgggccttcctttatcctccggtcctcaaccggaggatttttattgctccacaacgaccagcctgccatggacggccttcacccgggccggagtacgggtccgttccgtccagtcccacgctcgggccatgtccgcccaaaaggcggcgtggggagaatccttttcctctgacaaacgcgccggagtgggcacgaagggataaatctgcacgggaacgtttttttgcccatgaaccagagcctgttccaccatggtataaatctcctcaattccggaatcggtcatcgccaggcagccgatggaaacatcccggccatgcaccatgatgaagcttcccgtccggttcagggagcggtcataggcattcggatacccgatgttgaaagacagatggtaattgctccggggattgagcccggacggttccacttcataaaaaccttccggcgtttgcctgtccccctccttctccttgggacccagttttccggaccatgcggcaatcggatagcgcttggcaagcatgtagcattccgccttgtccggtttcacccacagttccaggacggagtcttcctttacggcccgtaaaaacacaggacttcccaccctggcgccgcacggctccagaaaggaattcagcacgggcgttacccgtttccgcgcgatatccgcacggttggaggatttttctgcacatgccatattgaaagccgctacggcggaaaccagcagaaccagccccagcaaggacaggactacattcttcttcataaatcatctataatggcggtttttgttttgacaagcagaaaaccagccggttctctccgaagaaggaaaaggaaaaaacggcggaaaaagaagacggaaagaaaagcggttcctgagaaaggcgcccttcgcgaagctgtccccggatagaatccatgtctgtgctggaaatgcaggctccggagaagtatcatcggccctcagaacatcagcggaagaccgacctataaacgccatggaaataaacaaccttcttcccatcactacacggaaggaattaagaatatggctgggaaacaaccacctcacttcctcctgctgctgggttctcacaacgaggaaaccttccccacatgccctcctttatctggatgccgtggaggaagccctgtgcttcggatagattgaccgcacccgcaagaagacggcctccggtttcctggcccagcgtctcactccccgatccagaaagagtaaatggtccgaactgaacaaggaacgcgtccgccgcctggccaggctgggactaatgacgccccacggcgaaaaatgtctgccggaaatgaacccggaaacgttccgtattgactcgtatattttacagctccttcaacaggatccgcttatttacgccaatttcctggcgtttccccggctataccgccatgtgcgcctggataccattcaaattaaaaaaaaccagccggaactgttctgcaagcgcctggaaaaatttctgaagaatacccgtgaaaacaggatgtacggagaatggcacgacggaggacggctgctggaaaagtagacgccaggatcccgccatttccctgccggacgagctctgacgttaccaggccgttccggaataaatccggaacggctctgaagggtcaggaggaaggcctttcgggggtgggcccccctccttgtgttttctttcttttagaaatcgtagcggtagccgacgcttccgttgaccgagctggacccgtcacggatgtccgcgttcccgttcacgtagatggttcccttcgttcccaccggcacgcttaaccccgctcccagctgcagcgccgccgttcccgttttcgcccctctcacgctttgcgcgaagccggggttgcccagcagggagacgttcgtttcccctctccggtctcccaggtcctgcgccgcgttgacccggatttccgccagcgattcccggccgaagatgttgctgcccaccagacccatccaccggccgcccagcgccagcgtccccgtcgtccagtcctgccggccgacgttcaggcccgcgttgcccgctcccgtttcttcatagccgtccatccgcgtcgtcaccaccgaggcgttgaacagcggctgcagcacgctgctgcggttttcgtcgaggtagatgtcgtaggtgagttcgtacatcgctccaaggccccacccgctggtgcttccctgcgtcccgtagcttccttccccgtagctgaccgtacggttgagtttcgcgtcgttccaccctcccgtcaggatgagcgtgtgcgcccagcgtttgttctggtagcgcccgaagaggctggcgtagtagctgtccaggtgtccgtcggcgctgtccgccgcgccggccgtcaggtcgccgtagccggccgtgaaggccgctcccaccgtgaggcggtcgctgaggtccgcgtccatgcctaccgtgcctccccaggtggtgagctggtagccgctttcatccccgcgggtgtcgagtttggcgtaggagcccgtgccttccatccacatgtggaagcgggggaggtcgtcgttgacgtaggccgggttgacgcccatgagggtggtccggttcctgatccagcccatctggtcgcgcagggcgtccctttgcgccgtccccagcgcgttgaccgtgctcccagccgccgccgccatggcgcgggaggctcccgcgcggtcgccgctgctttgcagggataacacggcgttatacagggtcttcagctgggagtccacacccaggttgaacctgcctccccagaggagattggcgccggaggtagaattgaaggtttccgccgaggcggcaaagacattatcctggcgtgccgtcccggtcaggatgatagagctgccgactacctccagtctcaggtcattgtacatggaactgaggatatcgtcctgcagggtcacttcccccagggtggccgttccttccgtggaggtgaacagcgtcagggagaggtgttccatttccgacgtagtcatggcgttcaggttgtgggttactactgtcgctccatcttccaaggagatgttcccttgagattggatgaccggcatcagagccgtcagttgatccatggtggccgcatccagattaatagtcagggtacctccggactgaaccgccagacctccggaaccaagttccagcctgcaattgggtgttcccgtgctgcccagagtcagtcttccctggtcacctaccgtaattgctccataggaaaccgtttcggaagaatgttccagcaacaaggttccgttgaacacttctatggtgtagtcggcgtttcctgtcccggccagcgtctgcatgcctccggacaccttcaatgcgcctctgcctgccagcgtgccggagaaggttccggaggaggttgtcgccgaggagatggagaggctgcctccgttcatggacagggcgccgcttccggagaggccgctgatggcgccggattccgttccggtgagggtcagcgtgccgtcggcggtgactgaggttccgtccagccgggcttctccgcccagggccagttccgctccttcccggatgcggagggagccggttccggtgatggctccgttgttgatgctgcctgttccggtcaggttgagagttccctggatggtcagggttcctccggcttccgtgccggtgatggttccgacttcggcgttgccgttaatggtcaggccgcctccttccagagtgagggcgtccagggtgtttgacgccccgttgaggacgatggttccttctcgcagggcgagggtttccacgtccatcgttcctccgaccgtcagcgtcccggttccttccttgatgaaggtgaccgcctcgcctccgatgatgctgccgcccatgatcgtatccgttcctacccgggccggatccgtcactccggaatcaagttcgggattcagaacggcgttgtccagaatgacgatggcgttttcagtcatgtcggagttggtgaccctcagggaagagccttccagccccaccaggttccggacgtgaagcccttccccgttgtccggggctccggacaatgccacgttgagggacttgccggagtccagaacaacggccttataggcgtccagggcagggtaatctgcaatggaagacggataggagccttcccctccggttaccaggtaaaccagattggaattaccgctgatcagcaaagctcccccgtccgttcccgtgacggcgtagcccagagaggaaagcagcgggctgaattggagctgctgcctgtaagtgtccgcatccgagaaggaaagcgtgcccgtcgtcagcagcaggcgtacgccttccgcggagtctttggtagttttaagcaaatccaccagcgccccgttactcaagtcgatttctgtttcatttcccgtcagtgtcagggaggaagcgccaatcatcgcctcccccggctctccggcgggaacggaaacgttgcctgttcccagcgtcaggacaacttttttgccgctcatgtccagggcggcggcgttgccttcttcatcctgaaagtccagacgggcccccgcggcaagaatgacggaggagagggcggaggaagccagcccttgcgtcgtgacggtgttttgctctccagcctcgacctgcacgccgcccgcagcggcatacgcgccggcacgagacagcgttccgttggaaaccgtaatgccgttcgtcagagcctggccgttcatgtccaaaaccccgccagtgacggtgaccgtgcttaagccgaaggcggacgcgcttccggcaaccaatgtcccgtcttccacgatggtgaggccttcataggtattgttcccgctcatggtcacctgcccgccttgctgggtaatggtgcccgttcctccaatgacgttggccacggtctgttccgaatccaccgcgtatgtcaggaaggcgtctcccaggccgccgagcgtcaccgctccggaaccgagagtgccggatcctgtcagaaggagggttccttccctgatcagggtcgcattggtatagctgctcgccttcgtcagttgaagcactccgttcccctgcttgataaagctggttccgttaccttcctggttaacgaccacatccagcttcaaatccgccgtattggtttcgtccagcgcaaaattaccgcgggcgatatcaaagacagccgttccgccgcggagggtcagcccgacagagggagctccctccgccacggaaaagacgctcatcccggcagcggactgctgcgtcacgatagtattggtgccgctgaacaggtcaaaaccggctcccgagctgctagaggcagacatattcaacataatccggctattgttgaacaccatcctagtgttggccatggtggtattgggtccgtcgacattccacgtgccgctattcagggtcaacgtgccgaaattcccattgttgttgtaaccgaacggatcgcccgcggtagtgttcagcgtgccgccgttcactatcaaatcgccgtaaaggatggattgctgtccgcctccattcttgccgaggttcagaaccgcaccctctcccaccgtcgtcatgccggttttcgtctgggcggcggaaaccgtcagggatgttcccgcccccgacacttccagattgatatcggctccattggccagatcaaccccgagagtattgattcccccggagacaaaggcgatcgttcctccattgatcgtcggcatggcgtctcccagaatatccgcaatccctcccgcaacgccgatttccagccgtccggcctcctccacggtcaccgccccggttcccagggccttgttcgccttcacggcaacggttccctccttgatgttcaccgcgccggagtaatcattgttggagttgttgaaggtcacctttccttcacccagtttggtcatggttccgttcccggcaagcttgcctccatcgttggtcagttccaggtcctggccggttccgttattgaaataaacagccttggcattcacaacccccgtcagggacgccgttcccgtatgcgttccgtcaaacaggtaggtcgtggcattggtcacggctcctatcgggttgccgtcccagaccaccacgtcgtccgccatgctgacggaaaccgtcaccgttttggcggagacatccacattgaaggttccctggtacaggccggccagcgttccggtcagagacatctcctcgccatccgcgaaattgccggccgccagattctcccaggaaaccagcgtgtacgtcccctcgctcacgctttcattgatatccaggctgacgagcgccttctcgcccagggacaggttgcttacggtcagagccgcccctccggcgctcaaagcgtttccgtcaaccgccagggaagaggcgtgcagtgttccggtcacgttctgctgccgcagcgccgtcaccctggcggcggaagcgttcaatgttccggccagagccgtatccgcattcaggtaaagattgttccctgaaaggttcagcgttccggtaaaatcgccaacatcgccgcccagcgtcagggagcccgcgttgttgcgggtagtgacggccagcgttcccgcaccgcccagtccgccgagcatctgcaggctgtctcctccggcgagggtcgccgttccgctgccggacgtttccacggacaccttgccgttaagcgtcgcggttcctgtgattccggtaaagacgttcaggacggtcgcggcgttcgtccctttcagcgtgacatccccgtccagggacactccccccgccgcggctgcggcattcaagccgttgaacgtcaccgtgacatttttttcactgccgcccagcgtgacgctgccctgcccccacggggtcagcacctgtccggcagcgacggaggctgtgccgacattataagtcaggctgatgttactaccggttccggctatttccgtatcgccgtcataggaattcttcacccatcccgttttaaaattccagccgttgcccccaacatcggaaatgattttcaggccgcccgttcccgtgatggcggaggtcagcgtggcattatttccattgctggagccgtcaatgacggcatagccgccttctccggcgcccagccggatttgcatgtcgatgagacggttaccgttcccgttcagcaggcgcagcttggaaccgttccccatcgtcaatatgcccgtgccggtgatgttggtggcccagccggtctgcatcaccgcgttttctcccagggtgatgttcaggtcggagcttaacgtcccctctgccgcaacagcgagagtgcctgattccaccaccagcgtccctcccgccgatgcgttgaacgcgtccctgctcagggacagcgtgccgtcacccgtcttgacgaccgtcccggaaatgcctcctcccagcgtggcgttgcccgctccgatcaccagcgagccggctccgctgttaatcagcttgcctccgtaggcgcccgccgccagattcaggctgccttctcccgtgcgggtgatggttcccatccagccggccagggatgcccatgtgacggcattcccgttcgtatccaccagaacagcgttggaagccaacgcgcctgtctgaatttgtccggaaatgtccgccgttatcccagcgccgtatttcagagagcctccattaaagatgatgctgccggcacccagcgcggcgtcatgccgcatttccaccgtgccgccgcccagcaggacttctccggaaaaaccggcgttgtccgtggcgatggacaaggttccgctgccggtcttctgcagcttggagcttcccaccagggaaccggaccccgtccacgtataaccggttgcgtcagcattgacgacgatcaggcccggattcacctgcccggcgatgttcacggtctgcggcgcattgcctgctacgtcaccgaagatgactccgttgccgttggcaaaaggcaatcccgcattccagggggaatcccccgttcctcccaccgtccacgtattgtctccgccgcccgtccaggtcagggacgtgacctgcgccacgacgaatttcagggtattgtccgtcgtgctccagttgccgatgtattcggtccccagcagaatggtattggccagatccccggtgatgccgcccgtggcattaatcagattgtacgtgcccgcgctccagctcacgctgtcgctgttctccagcagcaggctgccgttcaccgtcagggcgccgttcagggccagcaggggattgccgttcaccgtcatgtgagtggcgtcaatccgcacggccgctcccaggttcagtttgccggtcatcgtattctgccccccaagggacagaacgccggaattcatggtcaaaccggcattgtcatccacggcggaaatgttcagattgactcccgaggacagggtaaagtcgccgtatcccgcggaaaggccgccgattgccgcattccccgtaacggaaagatgcttgtttgtccccatgccggaggcatggccgaccaccagggttcctccttttaattcaaccccgcccgtgaaggaggaggcatgggccagggtcagcgtcccggaaccgtccttgatcaacctgcctgtcccccggaacacattgtcgccggccgtggtcatattcccggccccggtcagcgtcagggcgccgttcaactgaatccactgggcggaagataccgtcatgcgcacggtgctggaggcattctccacctccacggcgccgccccccgccgctaccgtcaggccgcacccgaattctccgttttcctccttggtaagctccaggcgccctttgttgttcaaggtccagtaatccgtattggtggccatctgacccagaccattataggaatattcccccacgcgcagcacgccgccgtcggtcacggtcacacggcaacgggtatacccccccgagttaagactggcgtccggagcgctcaaatccagcgtagcgttattaatagtcagtgttttggagattggatcactcccgattttctgcgtagccgccgttttaatcctgaaaacgccgccgccggtgatggtgaggctgttattgccaatattgaacgcaccctccgcctgggtcagcgtctttccggattcaatggtcagggtcagaccgttcgctccgatgatcgtcgtctcattccaaatggtatcagtactaatggttacattacttgtaagcgtctcggcagaggctgtcaaaactgcgacggaatagcaggcgagtactgcggacaacagggcgacgggcagatgaagcttcataaaaaataattaatagtcaatatgctcaacacgacgtaatttttcaacagagataaaatacgctattacccggatgtaatatcggatttgaaattcgttgtcaatgacaatttttgaggccaagccctttaggagcatggaacagcctgaaaggggaaagagaaaaaaacggggataccagtttcaagaatcggcattattaatattttaatcattatctgggttaattcacatcatttgcggatttcaaatccgtccggttatttaacctgtttctcccagcaagaaaaccccgcatgcaggaaaaaatgatttcttgtcttgcatttctgcgggagcgcctgtataagcctccacgtccccgccgcaaggcagggacggcatccaaggtcatggagcggtagctcagttcggttagagcgccagcctgtcacgctggaggtcgcgggttcgagccccgtccgcttcgccaccttgttcagaagaaacagccgcctccgggcggcttttttcgtccagaaaacctgaattccggaaaacaggccgccccccccgggaacgttttactggaaaaaggggttggacttcagtagaatgggggccagcattacaatcatgagcatactttcggaccgtctttccgcggaaatactgcaggcccgccagcgcgtctacaccgttggcgagccgactcctctccagcgattgaatctgccgggcatccaggccccggtatacgccaagagagaggatctggggcccatccgggcctataagtggcgcggcgcgttcaactgcatggccgcattgagccaggaagcccgtgacaagggcattgtggcggcttccgccggcaatcacgcccagggcgtggcgctggcagccagagtgctgaactgccatgccaccattttcatgccgcgctccacgccggaagtgaagcagacggaagtgcgccgccacggcggtaggcatgtgaagatcatgctccatggggactgctatgacgagacggccgccgccgcccatgaatacacggaaactcacggctgcacgtttgtccatccttatgacgacctggtgaccatggccggacagggaacgctggcggacgaagtggtgatgagcggagaaggcccttttgaccgcgcgtacgtcgccatcggcggcggcggactggccgcctccgtggcgtgctggctgaaaaaattctggccccgcatcaaggtcatcggcgtggaaggcatcgaccaggcgtccatgaaaacttccattgagcagggacgccgggtgaatctggattacgtggatgtcttctgcgacggcacagccgtccacatccccggagaattaacctatcccctttgccgggaactggttgacgagttcgtgaccgtgaccaataatgaggtctgccaggccatccgggccatgtgggaatcctcccgcgtcgtgccggaaccatccggagccatgagcctggcaggattcctgaaacaatggaaccggggcgaagtaaagccggaggaaaagagcttcgtggtcatttccggagccaatatggatttcacccaccttacccagattgcccggcaggcgggcatcggcaaccatgaaacgcgctatctgcgcatttccatggattccaagcgcggccaggtgcttaaatacctgcgccacattccgcaggatacgacgctggtggatgtgcaatacggtaaaacggagggaagcacccagtaccccgtgttcggcattgccgcttccgatgaagacctggataccatccgcacgacactgaaaaagaaaggaatagaattcgaagacatcagtgaggacgacgacgtgcgcttccgcatgattcactaccagccggaactgtgtcaacaccccctgttcgtccacattgaatttccggaacgcgccggcgccttccttgacttcatggaacgcatcgcggatctggcttccctctgttatttcaactatacctacaccggggaacgcgtaggccgcgccctggtgggcatggaatttgatacagcggaagaccgggaaaccatccggaaacgcatgagcgccttttccaaaaacattatcaggtccattcgggaaatttcccccgaggctttccagaggatcatgggaagcagacagttgacaggcaatcattgacagcccatcatccagggagcttgagaaagattggctccctgtttttcatgaccgctttcttctcccatgattccgcccgtcatcctggcctcccaatcgccccggcggcgtgaattgctggagaaaaccggcattcctttttccattattgtccgggatacggaagaactgaaagaggcttccatgcccccgcaggaactctgcctgcacaatgcttccgccaaggcggaagccgtgttccgggaacatccggattccaccgtcatcggcgcggatacgctcgtttttctggaaggcttccctcttggcaagccggaagatgaagaagaagcccggtccatgctccggaagctctccggacgcacgcaccatgtctgcacggcggttgccatccgttccccgctgggcatgaaaaacctggccgtgctgacggaagtaacgttccggaagctgacggaaaaagacatcctccattacatggaactggtggacgtgatggacaaggccggctcttacgccttccaggaacacggggagatgattatttcctccgtgcgcggggatacggacaacgtcatcggactgcctgtcagggatgtgatgaaatgcctgaacggcctgggataccgggtttgacccgtccaggaatccggacattgtctccggaagaaaaggcgtttcccgccccgaaacggccttcggagcgcaaggcaaagccccaggcttcaggaacaggggattacctgtctgccaggaatgattccagtttattgtaaaaggccacaggaagcacagcttccagcaaggtcccttcctctacatattccgtagagaaaaccttgccttcactatgcatggcggccaccaggtcgctgcgggtatagggaatcaggaaccgggcgcgccggacacggctttccagcatttccacgcaggcattcagcaggtctccctcaccattcccttctttcacggacatgggaaccaccctgccgctgaaatgaggcgccagcagcgtttccagggccccgcgccgttcttccggcaccaagtccaccttgtttagaaccacgatcatgggcttgtcacccgcacccagttcgttgagaacctccagagtcgtttcataatggcgcacggcttccggatcggaagcgtccaccacctgaatcaggaaatccgccagaacggcttcctccagcgtggacttgaacgcttccaccagacggtgcggaaggttgcggatgaagcccacggtatccgtcagcagcagcggctgcccatggggaagctctatcttccgcgttgtggtgtccagcgtggcaaaaagcatatccctggccatgacttcagacccggacaccagggacaggagggaggattttccggcattggtataacctacaatggcggccgtggcgacggcctggcgctcccgttccttgcgctgcgtggcgcgctgacgggtcaccaggaccagttccctttgaatagcctcaattctggcgcgcgccaggcgacggtccacttcaatctgcttttcaccttcccccctggcggctccgccgcctcccttgccgccgccggagcccccgccctggcggtccaggtggttccacatgcgggccatgcgcggcagggaatactgcatgcgggccagttccacctgcagggtagcttcccgtgtccgggcgcgcctggcaaagatgtccagaatgacctcttcacggtcaatgacgcattcgtcaacaagccgttcccattccctctgctgggaaggggagagcatattgtcaaaaacaacgcaatccgcccggcaatccagcgccagctgcttcacttcctgcgcctttccggtgccgcacaggaatttggcgtgcatgtccctggacttgatgaggtgcttccctgcgatgccgatgccgagattggagacaaggtcttccagctcatccagcatggcctgtttttccccggcctcggagggatcgaagtaaatggaaacgagcatggcccgttccaccatttccggtttttcgcggatttcaaacatacagggaagttaacggaattgcttgctggaggtaggctggtaatccttcagagcgaagtccgcgggcttatgacaatcacaactgcatgaagagaggaagccggccacgcatgccagcgtcagaaagctgatcagtctcatgcggctatgagacctgtccgaagtaccctaggcaagcaaattttacttcatcaccattacttttctccaaatccggaacaaaggcatttacccggacggttttccttttttccggcccgggggcagccggcaaaacacgcggcgggggcagaaacctgccggcgacagcaatccgccgcctttcaagggactttattcccttccggaatcaacttgattttccatcgtctcccggcagcccttcctccgcctccagactgttcatccataaattccatttttcaatgaaagagcggtccatctgaagcaatgctttttcctgctgtgcggaggaaatggttcccgtcagcctgccaaaaataagcaaaggcttggaatacgtatccgtcagggaagaaaattccgcaggctgcttctggcggcattcccgcgccagagcatgcagggagttgaacggaagctcgttccaactgacctggtacgcaccgcttccttcccgactgtcctgaggctccacggtcagcagatgtcccttcatccctttcaggcgcaccctggagccatctctgagcaccagagttttccccggtttcttttccaacagtacgggcaaaagtttctccatgcgggagaacaacggcagcatctggtccgtcatttcccggcgcatggccagacgggctttcaccgcaggagaggaaatgactttttcagcctctccataaacagtggaaactttctcataatcaccggtttccttcatgatgccctccgcttcccggcagacgtcttcataacttctggattgggcggccagcaggatttccctcctcttttcctcctccagttttttttgcatctcttccgcctttttcctttcagacgccttcacggcttccgcagcctcccagtcccgcgcagcctggtactgcatcctcaaatgatccagtattccttccagcgcggcataagccggagacatggaaggaacttccccaatgaccatctgttcccgcaggaagtccgccgcggaccgtttggcctctacttcagccaccgttttttccggcatgtcctgaagacgtttcaagcgcgcgtactggtccgtatacttctccaggttgctgagccacgcggaagccagctcacggacgttcctgtcccggtcatccgccgcatcagcggccacccggtccagaaagccgccgtattccgtccatctcccggcaaagtaccaggatttcagcgccatgcccacataataatgcacggccaggtcagaattggagcgcagccccggcatccgggaagaccagtctgcggagctcaggtacatgaccaggttgccaatatccctggaacgttccagttcctcagggtccccgcaggcttccatctttctgcccagttcttccagacgctccaccccttccgggaactggccgcgcacccacatgcacagaacctggttcaaaccggcccaaagggatgtggacagggggcagtccggctgagccgccaaatcgccgaacatggcggcggctttcaccagatccccacggttcagggattcctgggcttcgttaaacagtttgccgaagcgtatgctgcgctccagccgcgattccgccgcctccctgtcttccaaggctgcttccgccgcaggagaaataggcgaaggcggagttacgggagaaggagctccatcctcccgccattccgcccatccccaaacgcccaacgccagcgccactacggaaacaatggaggaggcaacgatgatgcggcatttcctgcgccgtgcgtgccgggcctccaccgcgcgccgttccgcccaggtgagaccggattcctgcatggcccgggcgtattcctcctgcgcctgttccacggcatccatcaattcgggataggaagaaaacctgtcttctttattaaaagccatcagtctgtccacaatgaaacaggtcattggagaaatgtcgttcaccacctgctccagaagagggagatttttcttgttctccagaagaatatcggaagactgggaagcgtccacacggggaggcgcacctgccagcaaatggtacatggtagcacccaaagcgtacatgtccgtacggaagtcctcctctcctcgcagcagcgtttccggcgcggcgtaataaggagtaacccatatttcccgctccatgtcggattcgctatgaagcagggacaggccgaaatccacgattttgacgactccgtcgggggacaaaagaacattggcgggcttgatatccctgtgcataaggcccgcattccatgcggcgtccagcccgcgcacgatatccagcgtcaggcgcagcaccctgtcttccggcacacgttcctccgcagcaatcagggcatccaggccattgccctccaccagctccatggcaatgtaaaaaaggccctggtcacgcccaacggcataaagctgcaccaggttttcatgggaaacccgcgccatgatccgggcctcccgttcaaaacgttcgcaacgcagggcatccccggcataagcatcattcagcactttcagggccacttcccgccccagaacggcatcctccgcccggaacaccacgctcatgccgccttttcccagttttccggtaatacgataaggccccatgcgcgtttttacacgcgtcagcgcctggcagcccgggcaaatggcgttggcgtacggaggcagcagggaaacatccatgggctgtccgcacgccgggcaattgacgatgttttctttctggggaaccatgaacgcagggcggcggaacgggaatcagaaaaaaggaaggaggaaaaatggcgcggattgtccgcccccctccgaatatgagcagggagggcccccagccagggcccctcccgcaaatttgattaatcccgtcaggagagagccggaagggaagcggcggctacggcctgtccgtggcgcttggtcttttcatccggcacgcggagctggatcttcagctcggggaattcggtgcgcagcacttcttccgccttgtcaatgatgatctggccgccgtctccggaagccacacggcccaggaagagcaggttgcggatatcatagaacctggcgtaatgggcaatggcatagccgaagtgcacgccgatggtttcataaatcttgcgggcgcgttcgtcgccttccgccatggcggcctgaacctttttaagctgttccgggaagggcattccttcaaactggaagccggcgcggggggccaggcgggccacagcctgctgggagaaataaagggcgcctacgcccatatccttggaccattcgtccactccgccttcctccgagtagtccacaggggcaaaagccagttcattcagccagggcttgatgtggccttccggatccacgtagccggcggcctcggaggtgcccatggccacgccgagcacggcgttatcgttcatgcccatggcccctgcgagggcggtgacttcaccgtcattcaccacttcaaagggaatgttgttccatttttccttctggagggtgcggaataccttgccgagagtcttttcaatgtcttcctggctgacgccgcggaacagggaggaggtgcgtacttcactgttgatgatcacgccggcggaggatccgccgatggcgtccacccggggcagatgagcggcggcgcgttccagagaatcctggattccgtcaatgtgatactggggatccttctggaagtaagggtcccagaccacttcctcggaataaaccacttccccattcaccacggcggcgcatttgcggtcggaaccgcccaggtcaaaaccgatgcggcatccgtccaggttgcggcccagtgtcatggagccggagtattcctcgggaagttcttccacggaaacctttttcacttcaatcggggagccgtaaatcttcttgccgatgaaatcccagtcgaattcgcggataccgcccttgcaatagcgggaggccagcatgtccgcaatagcgtcatccccggcgacgaggatgatattgccgcccttctgccacagcaggaatttcacaatgcgctccacataggtttcattcagggcaatgttttctccggtatggggaagaagcttgccggaccagcggaaacaggtcccgtcattgcgggtcagagcgatatccacttgatgagaagcaggatcggcggcggctttggcctcaaaagcttgattccaaagaacggccggcacgaagccggggtccagcacaggcgtgattttgggttgaatattcatggcgataatccgttgggaacgtagcatacccgcttttccttgaaaagtattcattccctttccttatgatttttttttgcggaatgaggggagatagctcattttctgctggaaaatcaccgtgtttccactaaagaaacaggagcttttcttccggcgcggccccctggaagggcggcccattccacacatgcctattccatgaatgaattaacggaccagctcattaccctgttctcttccatcctgattaccgtcatgttcctcgccgtggcggtaaacatattccgccggaatcatgcgcctgatacccggcatccgctgaaatggcgcattcccgtaggccatctggacatgctggacatcgccatgtgcggcatcatcgtgctttacttcagcctgggggccctgttggcggcagccacgcctccgggtgcttccgctccgcccagcacaaccaacatggagctggacagctacaaggttttcaacggaacctgcctgaatctcattctggccttcgtcctgctggtgcgcatgttccatacgggccggatggaggcgctgggattgaaaaaacattccctgaaagtcctcctctacgctccggcggcaggttatctgctggtgctggccatccatttcctgctggacaaggcgggcctgttccagtggattgaacacgccaccaacgccccggccgaacaatccattgtttccgtgctgaggcattccagcgacattcccctgatcacggttatctgcttcagcgccgccatcgccgcccctctggtggaggaacttattttccgcggttatctgtacccgatcatgaaaaaatacacgggcgtctggtttgccctgatcaccacctccctcctcttcggcatcatccacgtcagcctggttccgttcatccccctggcaatcttcggagccgtactggtgctgctgtacgaatacacgggcagcatctggacgcccatcatcgcccattgcattttcaacaccgccactctcatcaacattctgtatcccggcatccttcttcagtatggaacctgagcccagcatccggcagacgggagaggatgcgctggtagcccgcctcctgcccctgatgccttccaatccgtccctggaaacggggccgggagacgactgcgccatcatccgggggtcaggaaaccgccagctgctcctgaaaacggactgcgtggtggaaggcatgcatttcctgcccggaacggccccggagctgatcgggaggaaggcgctggcacgggccgtttcagacataggggccatgggcggcacgccccttcacgcactggtgaccctgttcgtgcacgcagaccgccccatctcccaggtggaaggaatttaccgcggcatggggcggctggcgcggcagttcggcatcagcatcgccgggggggaaagctccggcctgcctgcggacgggcttatcatcaacgtggcgctgaccggagaagtggaggaaggcaaagccgtactgcgcagcacggcgcgggcgggggatctgattgccgtaacgggaacgctcggcggcagcttccccaccggtcaccatctttccttcatgccgcgtgtcagggaaggaggcatcctggccgcctccggcgtagccacctccatgatggatctttccgacgggctgggaaccgacctcccccggctggcggccgcctccgggcttgggttccgtattcatgaagagcttcttcccgtgcgcccggggttcactgcggcccaggctgtaggggatggggaggattacgaattgctggtgaccttccgtcccggcgaccgagaacgggcggcacgactggccgcggagcattttccggaaacgcctctcaccgtcatcggggaaatgactgcggaaacggcctccgcccttcccccaggttacaggcacttcagctagcccgttaagaatcgggggcagagccacgcaaaacgcctgcggaattattccgccgccttttcctcctctttctcccgctgcatgtaaggcaggagctgttcatacgcgtctttgcccagataacgcttgatggaacgctccggcgttttgaaaatgtccaccaggatcaggcagtccaatacgtcgccaaaatgcttgtccacgctgaaggaaagaattttgccgttcaatttcagatattggcggagcaatacgggaatgcccttgccatcctcttctatatcagcgaccaattgggacagcccctgggcatctgccagccccagagggaggatgcatgattccgacctcttcagatccgctttacggggcggattgtaggccctcacctcattcaccagcacgggctccatttcatgcgccttcagataggagacgatgagggcgcgggaaaggttggtgtaatcccgggaaatgctgaccgtgccgaacaggtagcggtaatggtggttgcgggccatgaactggccgatgccctcccaaatgaaaccgagagccagcggcctcttctggtattccggaacaatgaaggcgcgccccatttccagagagcggtccagcacccgcaaagcggcaggggaaaaggaaaagtattccccgttgtacagccctttgacaccgtagcgggcaaggattttgtccgtttcccccatgcggtaggcgcccacaattttctggtgcgttttgtcccacaggaacaggtgcttgtaatggttatcgtatgtatccaggtcgcaggcgttgccggaaccttcccctacctggcggaaagtatattcccgcaaacgccctatttcaataaggatattggggatttgcagggcatccgccacgtacacgtcccaatctccattttcctgacgggcatgcagacactccgggggcagcgcgtcgatttccgcctgcatatcctgcacggaaacgggggaggtcagcgcggccatcttcgccttccggtcctttttgtgcacatgggggcggcggcttttttcataacttttgcccagcagataggtgcgcaggcgcagatgggagacgatggcttcatcggaatcatactgtccaagctggctgaacggaatgggcttgcctaccacaatgcggtgtgtccggcggccgtcccgacccacttcacggggaaggaacgccacgcgcgccttgcggttgatcagggaaatgccctggaacagcaggctgttgcgccccgggaaatatacgggcaccaccgtcgctttcgtcatgcggataatggcggcgatattcgcgttccaggggtcgtccgtcacccttttgtgagccagggaaaaactggagaccgtgccggcggggaaaatgcccagaaccccgccctgccgcagccaggaaatcatcttgcgcatgccggaaaggtttttgcgccgggcgttctcatcctcatacacgtccaccttgatgagccagggatccagctctccgcacagggaaagctgctcgttgaccaggatgcggacatcctctcttacgcgggtaagcagctccccgaacatgatgccgtccgacaagccgtgcggatgattggcaacgacaacgacaggccctttcttaggaatattttccaggtcccccgggcgcagctgaagcttcaggttcaaatgcctggaggcaagctgaaagaaattttcctgagaaccggattccttgtcgcgcacgatcttgtcgtacgccttgttcaggcgttccaggcccagcagcttttcggcggacgcggccaccagagcaggcagacgcgtattctcgtccaaaatgtctctgatgtccaccatcttcgggtgtttgagctgggccatgccccgctgtataacggatttacgggaaaaagtgaaactctttttgcaacgcccttcggaacgcagtcttgatttccacagggctcaaagctacaattcaaacggctttagcccccatttccaactcagaagacactcatgcatccagccatcgccattgacggccccgccgcctccggaaaatccaccgtcgccaagctcatcgcggaccgcctcggctatacgttcatcaacaccggggccatgtaccgggccgttacctggtacatgctggaacagggcatcaaccctgcggacacggcggccgtgctggaatccctgccggccgtgcccctctctttcggcaaggacggcagccaatccgtagttctgtgcggacagcatgtgctgggcgaagaactcacgagccagcaggtcaacgaccatgtttccaccattgcggccatcccggaagtacgcgccctgctggtggaacggcaacgggaatataaccgccgggaacccgtcgtgatggaaggcagggacataggcaccgtggtttttccggatacgccgttcaagtacttcgtcaccgcctccgaggaagtgagggccgcgcgccgcgctgcggagggactgacggactccatcgcggagcgggaccgcaaggattcctcccgcgccaccgccccgctagcgcaggcgcctgacgctcttctggtggatacgtcagacatgacgattgaccaggtcgtccgtttcatcaccgacaacatccaacaaaaactctcctccagatgaactctttctactgggttttctacacgctcttcaaaagcatttccaaagccttcttctcctggaaagtcgtcaaccgggaaaaactcatcgaagacggccccgtgctcatcgtcagcaatcaccagagctttctggatccgcccatgctgggcatttcttatgaggccggcatctattttttcgcacgcaagacgctgttccagggcattttcaaatgggccctgcccctctgccaggctatccccattgaccaggaaaacccggatgccgccagcctcaagcacgtgatacgcctgctgaaatccggtaagcgcgtactcgtgtttccggaaggctcccgcacgccggatggtaagatccatgacggcatgggcgggatcggcctcatcctgagcaaaacgaaagttcccgtgcagcccctgcgcatcagcggtgcgtatgaagcctttcccatcggcgcccggtttcccaggctccgccccgtcacggtcacggtgggagaccccatccccttcacgccggcggaactcaacgccaaaggaaaagatgcataccagcacctgacggacaaaatcatggacgccatccgctccctccctgcggaataaccccttttcccggccccatgatctccaggctgaaattaatggacttccgttgctacggaagcttctcctggcagattccgcagcagggggccatcatcctgggaaacaacgcccggggaaaaaccagcctgctggaggccgtttgcttcctgctgcgcctgcaatccccgcgcacagcccggaccgggcctctggtctcccacggaaaacaatccttcggcatccgcggagaacttccggggcaaatccggcgcatcctgtgggcgccggacgctccggacctccgcgtcaacggagagccccgcaaagaccagcgcagctacctggcggacagctatcccgtggtatggatggggaatgacgacctttccctggtgcaggccggcgcggacgcccgccggaaatacatggactttctgggcagccagtggcatccaggctacagactggccctgttcagctaccgccgggcgctgaaaacgcgcaattacctgctcaagcacaggcaccgggacaaactccagctggacgcctacacgcgccagctggccctgcacggcacggaactgagaaacctgcgcgcccatctgctggcgctcctggcgccccatattgccctggcctaccgcaatatcggcggaaggcaggaacaggtctccatcgcttaccgcgcctcggaggaaggagacctgtatgaacggctgtgcgcctccatggaccgggacatccggtacggacaaacccagaacggcccccaccgggatgacctggacatcacgctgaacggcagaaacgccgctcaattcgcttccgaagggcagcagcgcaccaccgccatctccatgaagctggcacagtcctccctcctgacggaagaaacgggacatacacccatccacctgattgacgatgtcttcggggagctggatcccacgcgccggatagcctttctgcagtcgcttccagcggacgcgcagagcctcatcaccaccacccatctggactggctgcacgatgctccgtgccccctgccagccttccggctggaggatggaacccttgcccccctctgaaaaagcgcggacagaaacaacgaacaggcgtccgcctgcggcatttccgggacgctattccttcacccatacgttcaggatttccacaatatacattttatggaaatccccggcggcataccactccggcacaatagatttatccagaaaggcttccgggttaagaggctccgcgtacagcttgcggcactccaacaccaggcgcgcttccgtaaaacttacattgccgttctccgtcacgtatggcgtcaggccggaggcggccaccttgtccgtatcccgtccgctcgttgttccgcacacggtcagagccttatggtactcatggctgaaaaaggaaagcgtcagctcgtccccggcctcaataaaacggaaggtatggcgctgggggcggataacgacaaacgccacgggcttcttccacatgaaccccaaaccgccccaactggccgtcatcatgttgaaatgctccggagaacccgccgtcaccagcatccagtcgcccccgatcaattgtacggcattatcctgaatctcctttggttcaatcttcttcatcatcgtctccaacgttcgttcgcaaactatcctacacccctcctcccatatgtcaaagctgtggagaggccgggatgacgcgggaaaacaaattccgtccccgccgggaagctccctccgtttggagttgcatttccagaacggcggccctagcatttccgggatgaaccacaccgcgctggaagacaagctgggttaccgtttcaacaatccggatctgctcgttcaggcccttacccaccccagcacggacagcaagccggaaacgcgccgggcgtatgaacggctggaattcctgggagacgccattctgcagctggccgtcacacagtacctttaccaccacatgccccaatccccggaaggggaactgacccagctgcgcgcccgaaccgtcagccgcgccaatctgggcaaatacggctttatcctggggctggataaacacattgccctgggaaagggggaagaacgggccggcggacggagcaaaaattccatcatcgccaatacatttgaatccgtcttcggagccatgtccctggattccaactatgaaacggccaaggctgtggccctgcgcgtcctccatgaagctctggattccgcggccagccatcccaaggaaatcaaccccaagggggaactccaggctatccttcaggacatcctgcccgaaactccttcctatgaaacggaagaaaaagggccgagagacgccgaaaaccgttttgaatcccgcgttttctggcatggtcacgccattggagccggttccggggccagcaagagaaaggcggaagtggccgccgccgcagacgccctggacgccagggcatggctccgcatgaccttgtaaccgccaaagggggacgggtggctattttgtcacccttaagccttggacactcctgtggctggtttgatagacagaagccgtctccgggagaaagaaccttccccggaagaccttctcacagacaaaccaaccatagaaaacaaatgaagacctatactctccccgtcatcggcctcatgactctcggagcctccgcctttgccgctgccgcaccctctaccggaaactccctgccggcccgcgacaacttttccgcctgcaaatggctcggcgaccgtttcaagtggttcaactcggaacgggaccacaagaatccctacatccaggaattcaacgtttccctccgcatgcagtacggactggactggattgacccgaacggcgaaggccgcgtcatgggagaaaaggaaggcaacggccgccgcttcaacgatgaatggcgccgcttccgcgccgggttcaacatgaagtttctgaacaacttcaagctcaacaacgtctggaacatcggcggcatggacggcctggaaagctacaatgcaaaaaccaacacatgggacacctccgacctgacctactccctttacgaactgaatctggaatacaagggaggccccgtcacctatgccatcggcaaaataaagccgcgcatcaccggggaataccgaacatcctcctccgccattctgactatcgaacgctccatgctggtcaaccagctccgctcggaaaccaattacggattccaggtgaacaattccgacaaaaaggataagctcggctgggcagcaggcgtctggctgaacggcaacgggggcaccggaaccggcacgttcaacaaccgcattgaacccgctttcaattcccgggacaactgcttcatcaccggcacgctgagctatgacacgtccaacgacgttttcctgaagaaaagccgtctgtggctggattacgcccacaatttcaccaagtggggagacgacgcccaaaacaaggcgtatgaaaaactgaccggttacggctttaaatccaaataccagggtaccggagccagggacgtggtagccctgacctgggaaggttccgagggggacttctccctgatgaccgaagtcatggccggcttcaacgtcatcggcatgaaagcgggggctgaaaacgtcttcggcgtaaccgtcatgccgtcttacaagttcacccctcactgggaaggagtggtccgctaccagatggcggcgggcagcaacgccgtaaaatgggaaaaacgctatacgcagaactccacttattccggaacttccgactgcatgcaggccctgtacctgggcgtcaactactacattttcgaatgcagcccgaacatggccaagatcatggcgggcatcgaatacgcccattccaacggcacggacgccagccggcagaaaggctttaccggatggagctacaacatcgccttccgcaccaacttctaagtctaagaaagtgaggcgcgaaaccacgcattaggtttcacgggcaggataaacgatatggagtaaaatccggttcatcctgcccttttttcttaaaatcacaatcggatatccgggaatgtttccgatttcaaagaaatcagcttgggcagggccgtgtattcacggccttttttcatcaggccgccggcgctcaccagattctggagtttttcgtaaatcctcagcctcaggatttcctctccgcccagggacatgtgctttgccttcatcacgacaacggtacgctgaaaaatgtcattgaattccagcatgcccgcttcatgaagaatgagaataagctcatcagtcaccaaatccggtgttttgcgcgaggaacgtgatctcctatcctccagcatgatgataggatattatcatgacacacttccagccgtcaagttgataaaatttgcgtcattttctgccggcatatgactcaaaaagcttcaaaggtgaaggagccgacagcgaatgaggcctgctccggaaaccggaaatgagttgccgccctttctctccggaggacttacttatccggaagaagaaaagattctctgcaagaaaagggaacagggaacacgtattacctgcagcccgggcagcaatacggagctttttacagagatgaaaggaaataaacggttcattttcaggttatgtgtagccgcagcgctttttctgaacctttttcccctgcaggccggagaatgcacgctgatgagctataacgtaaagaacggcaccggcatggacggcaggagggattatgaccgcacggctcgggtaatcgcggaggaaaaaccggatgtcgtggcccttcaggagctggaccaggggacaatcaggagcggcggcagggataccctgcaggaattggccgcaaggacaacgttgacgggtacctatgccaaggccattgattattcaggcggttcctatggagtaggcattttatccagggaaaagcctttgagcgtcaaacggattcctttgcccggcagggaggaggcccgtgtgctgttgatggccgagttcagggattactggttttgcgtcacgcatttgtccctgaccagggaagacagcagcgcttccattgatatgattgccgccctggccgcaaaatgcagtaagcctttttttattgcaggggatttcaatttaacgccggattcggagccgataacccggatgaagaaatatttcatcctgctgagcgatccggcccagaaaacgtttcccgccgggcatccgaaggaatgcattgattacatctggatgtacagggaaaaaagacggaggcgttccatgtgaaggaacgcagggtaattgaagctcccgccgcctccgaccaccgcccggttaaagtgacggtcagctattgacatgatgtttccggcccgtcaacgggtagcccgcggggcattgacgccgcccaccagcagcacgatttcccccttgggagggcgttccgcaaattccgccgccagccgggaggccggaccgcgatggtaagtttcaaaggtttttgtcagttccctggctacgcagacgggaatatccggatccagcgccgccagagcctgcacggttttgacgatgcgatggggggattcataaaaaatactggtatgggaagcttccactgccgtttggagcacagcgttttttttcccggatttgacgggcagaaaaccgccgaagaagaatgcgtccgtaggcagtccggaccccaccaatgccgtcaccacggcagatggcccgggaaggacggtgaagcttactcccttttccttgagggtctggatgagacgatagcccggatcgctcacgccaggcatgcccgcatcactgatcacggcaaagctttctccgccagccgcgcgcgccgcaatttccccggcgcgcggctgttcattatggtcatgcatgcttatcagcggtttgcggatttcataatgggaaagcagaagaccggaatggcgggtgtcctcacacgcaatgacatccaccttgcgcagcacgtccagcgcccgcagggtgatgtccgcccggttgccgataggcaccggaacaaaataaacgctgtattccactttctccataagcacaaattttcctgaaccgggcgggattagccattggtaagggtttccgcaatggaagtggccaccagacgggccgcataggaaagggcattcgtgcgggccgactgaatgttgccctggtcaaagaattgacctacttcctccgcagagccggcatacaggatttcctgcgtcctggcgtccaccacacggtatttgacagacaggcgcaatccaagttccgtacttttgtaggtgtcttcccggctggagcgcaactggtcgaaggtgatggagtacacttccccctccacccggatatccgcatccgcgccggagcttaaccggtaggtgccgtcccgctgcagctcatccgccaaggcgccggtcaccagcgtggcggcgcggggctccaaagagttgttggcaaagaggcataccttgacggtctgggccagttccagcttgggcggcttggtgccgccaagctggtagccgcaagaaccggccaggaggcaaaaaacgggcaggaagagtttgaaaacgttccggatacggttcatgaggacggagagttcctgttatctgctggtcacgcgcagttctttcaggcgggccttcgccctggcggcggcggcgggattgatgctgcctttggaggctacttcctggtagcagaagacggcggcatccgcatctttcatcttggtcaggtagtattccgccacttccagctgctgggccaccagctcacgcttcatggccgccagatcggcacgggcggctcccgcacgggcgctgttgggataacgctgaaggtagtcttcatacgcttcctgagcgcgggccacattgacgtggttgcggtctccgtccgcagcagcctggcgatacagggtggctatctggagctgggccgtgggggccaacggagaattggggtaattgtccaccaggttctggtatgcctctatggcctccttcatccggccgcgcgcggccaggtaattgcccagcacgttcatggcctgcggggcggtaggggcatacggggcgttgtcgcgcacatgcttcagccattccgtgacgttcgtgggatccatcctgacgtcaaacatccacagcacgcggttggtcaacgcgccgctcgcagcgccgaaggccatttccttctgccgggccatggcctgcctgtacagggggctgtccgggtggcggtcaatgagtttctggtactggtcaaacgcatccgcaggttccttgcgggcctcatagagttctgccattctgaaccgggcctggggagcttccctggaaagggggtgcttttccaccacgcgcctgtattttttaatggccccggagagatcattcttcgcttcctttgccctggcttcctgcatcagggcaatcgcctgctgatccaccatacggacggttccggggggaggaggcgcctccgaagagcattggcacagggccagcgccccggaaacggcagccatcatgagaaacagttttttcacattcatgattttacagcagaaaaagaaggcgcgtcaatccggcgaacgcagattgacgcgcaaaaggagttaatggcccttgccgtacacggcttcggcatcaaaaacgacgcctccgtccgcttcacgcagcgtgacgggtgccccctggggctgggctttcagttcatctccgaacggaacggaacggtaaaagcaggagtggtgcccggtgtggcaggcgccggcgccgcactggtccaccagcacaatcagggcatcctggtcacagtcaaccaggatttgcttcactttttgcacgtggccgctggttgcgcccttatgccagatttcctggcggctgcgggagtagtaaacggcttcccccagttccatggtcatgcgcagggattccgcattcatataggccagcatcagcggttcatgggtaatatgatccatggcgagggccgggatcaggccattctggtcaaatttgggggcgaattccacgcctttttccacattcaccttgccgcggtcggcaaagacaatccgggatgagatgtcattttgttccataaccggcccccttagtacatgaaatatccgacatataccaatcttttctgttgccctgacgcaacgaaatgctttcataggagcatatggcatttacggcatcccaagcgttcgacctgctgcgcaccgccttctcccgcaaccggcttcctcatgccctgctcatcgtgggagacgagcaccagggagcctcccgcctgatcctgcaattgctggagctaatgaacggcatccgggcagaccacctggacagtgtgagggacgagtattgccggctggtgcgccccaagtccaagtcgcgccgcatcctgcgggatgatatccgcgccgtggaaccctttttgcaacagcgcgcggcagaggggaaatggaagatagccgtgttcatggatgcggagcggatgaatgacgaggccgccaacgctttcctgaaaaccctggaggaaccgcccggacagtgcctgctcattttgtccacctcccagccggaccagctccttcagacgattatttcccgctgcgtgcgcgtcaatctgctgcaatccggggaattcaggctcacccccattcaggaggccctgctcccgcactggctggagacctgccgcaatctgaataatgacctggccgctctggccttccgcagcaggttcatggaagtcatggcggaagccaaggccgccatcaccaaaaacctgaaccaggctctgaaagatgaagccagggaagcggcccagggtacggacgcctccgactgggaggcccgcaataaggacgcgaacgccgcccagatagagacggaatacctggaacagcgcaatcaggccctggaattgctcatcagctggttcggccaggcagccctgattgcctcaggagccccggaagtcactccgattcatccggaggtgcgcacgctggccgcccagatgcccgtgaacgaattgctgaagcgcatggaggccctcaacaggctccgtgatgatttgaatttcaatattcacgaagccctggccctggatgtccacctgctggcggccgtcgggtcctgctgaccgaacacccccgcctgttaccgtcgggccgcgcacggcattggaaaaggcgcagaaggtcagtattcttgcttttccttccggagcaggggcgccatgatttcctcataggcgcggaatttctgctcatacgtcagccgcgccgccgccggactggtggaaggcatttgaatgacggaaagcgtttcccgaaggaacagttcgggaaaataccgtttaaggtatttatgggaagcggtgccgttgcagcagaccacgccgatgcccgggaagctatccagcagggccgcaatgtcattgggctgttcctgggagatgtgctggtccaggctgccgggcctgacgccggaggccaccacatcccacagccccaccccgccccggttgagcagagacaggcgttccccatatggcagggaggggtcgaaccccagaagggaccccatgattttccagaacgcgttgcggggatgggcgtaatactgggcctgacgcagggattcgtctcccggcagggaaccgagcaccagcacggaacagtccggggtgacggaaggagggaaggagcattttttcactacgggaaacggtcaggggttctgcatgccggaatgcctgcgcacttccttcatgcccacttcctgccggagcagggaggacagccacgggtgacttcccacggagggggccaggttgaaccgttccggcctggtgatgcgcgtgaaaatgacgcgcctgatccgggatttgggcaccgtcctggctccgtaaccgtccggaatgttggaagaccagaacgttacctggtcccctccatccttcaccaggacggtcagatggccggattcccggcgcccgatgcggtccgtccagaaaattttcatgaagtcgccggggcgggccttcctccagtcctcaaagttgatgccggctcccagcctgtgcaccaggacggccaggccggggccattggcgttcgcccatccccacggcccttccccgtcatgctggccgaagcgggggatgagggccagccacgcgcgttcggaaataacgggccgcggctgtgcagagtcccatatctgcagggatttcaaaaggagcaggtagcaggcggaggaacagaaggagggagcggcgttacggagaagaaaaacgggacggcgcgtgcgggggtcccagcggcaggctttctccgcaagggcctgcatggcttccctgctggtttcgtagccgccgccgttccggaattgggaaagtccggtccgcagggcctggtaccaggaagcctcccccgaaggcacggcgctcccccgccccgtggaagaaaggtccgcagccgatgctgcggagcacagcaatccaagacagcaaatcaatgtcagggcgttcctcatccttgctccgcagggtatacggacggtggaaaatatcaagggcggattgcgtgcggcactgtacgaaaaggaaagaaggccatagccttttccccggaattcctgttgttttgtctggacttatcgcccggcgtcccgtactgtgcgtcaggtcacgcgccgggtatgcggagcggagaggcaacgcaccttgggcggaccttgtttccggcatttatttttaaccaccacggaccacatagaggcatcataccatggcaaaacgcgaagatatccgcaaaatcctcattatcggctcaggccccatcatcatcggccaggcctgcgagttcgactactccggcacccaggcctgcaaggccctccgcgccgaaggttacgacgtcgttctggtgaattccaaccccgccaccatcatgacggaccccggcatggcggaccacacctacattgagcctctgaccgtggaccgcatcacggccgtgattgagaaggaacgcccggatgccctgctgcccaacctgggcggccagacggccctgaacctggcttccaagctgcatgaggaaggcatcctgaaacagtacggagtggaagtcatcggcgtggatctggaagccatcgcccgcggcgaagaccgcatcattttcaaggaaaccatggacaggatcggcgtgccggtcgccaagtccgaacccgtctattccgtggaggaagctgaaaaggtggccgctgaactgggctaccccgtcgtgctgcgccccgcctacaccatgggcggcacgggcggcggcatcgtttacaacgtggaggaactgcgccaggtagtcccccgcggcctggccgcctcccttatcaaccaggtgctggtggaagaatgcgtgctgggatgggaggaactggaactggaagtcgtccgtgacgccaagggacagaagattaccgtctgctttattgagaacgtggatcccatgggcgtgcacaccggggacagcttctgcgtggctcccatgctgaccgttccgcaggaagtgcaggataagcttcaggattattcctaccgcattctggacgccatcggcgtcacgggaggcacaaacgtgcagttcgcccacaaccgggaggacaaccgcatcatcgttattgaaatcaacccccgtacatcccgttcctccgccctggcttccaaggccaccggcttccctatcgcctccgtctccaccaagctggcttccggcgtcacgatggacgaacttccctactggcgcaaaggctccctggaaaaatacgaaccttacggagactatgtagtcgtgaagttcgcacgctgggcctttgaaaaattccccaaggcggccgacaaactgggcacccagatgaaagccgtgggcgaagtaatgagcatcgggcagaacttcaaggaagcttttcagaaagccgtgcgctctctggaaatcggacgcgccggcctgggccgcgtgaaaaagctggaagccctctccaccccggaattgcgtgaaaaaatcacgtacggcaacagcgaacgcttcttccagatttatgaactcctgcgccgcggcgcagccgtggaggaaatcgtgaagctgacccgcatcactccgtatttcattgaacagatgaaggaactggcggactttgacttttccctggatgggcaggacagggattccctttccgcggaaaccctgcgccaggccaaggaaatgggcttttccgacaaatacctggcccagattttcggggtgccggaaaaggccgtccgcgcccgccggcagaaagacggcatcacggccaccttccgcatcgtgcccgtcagcggcgtggaacacgcggaatactactactccacttacagcggcgcagcggacgaagttcccgtgaacgacaagaagaaaatcatgattttgggcggcggtcccaaccgcatcggccagggcatcgaattcgactatacctgcgtgcatgccgccttcaccctgcgcgaccacgggtatgaatccatcatggtgaactgcaacccggaaacggtttctacggactttgacacggccaacaagctgtactttgaacccgtgaccgtggaagacgtgctggctatttacgaaaaggaaaaaccggaaggcgtcatcgtccagttcggaggccagaccccgcttaacatcgctcaggccctcaaggacgccggcgtgaaaatcatgggaacccagccggaaggcatccgtctggcggaagaccgcgaatatttccgtgaacgtatgatcgccctgaatatccgccagccggaaagcggcacggcccgttccctggaggaagccgtggaactggggcgccgcatcggctacccggtcatggtgcgcccctccttcgtgctgggcggccgcggcatggaagtcatttacgatgaagaaaacctgaagcgctacggcgtagaggccattcaggtcagcccggaatatcccatgctgatcgatcgttttctggacaatgccattgaggcggaagtagatgcgctggccgacggcacggatacttttgtagccacggtcatggaacacattgagctggccggcattcattccggcgactccgcctgcgccatcccccccgtgacaatcgctcccaagcacatccgcaccattgaggaacatgccgcaaaaattgcccaggacttccaggtaaagggcattctgaacgtgcagttcgccatttgcaatgatgaggtttacatcattgaggccaatccccgcgcctcccgcacggtgcctatcgtctccaaggtaacgggaatctccctggcgcgctacgccacggaaatcatgctgggcaagaaactcaaggagctgggcctgaagtcgcgcgcctgccgtttcatcggcgtgaaggaagccgtcttccccttcaacatgttcccggaagtggaccccgtactggggccagaaatgcgcgccacgggtgaagtcatgggcattgcggacaacttcggcatggcctattacaaggcccaggaagctgcgggctgcattctgcctaccgccggcaaggtgctcgtcacggtttccgaccgggataagaagttcatcgaacccatcgcccgagacctgatttccctgggctttaccattgtctccaccggcggcactgcagaatacctgcgcggccagggcgtggaaacggaagtagtcaacaagctgcatgaaggccgtccgaatctgggcgacatgatcaccaacaagcaaatcgacctgattatcaacactccagtggaccgcaccagtatgattgacgactccttcatccgcatgcagtccattcagaagaaaattccgtacatgactaccatcgcagccgccagagccacggtggaaggcatccgctccgcccagcacgtgaaggtatcaccccgttccctccaggaataccattcctgaacgggaaactctcctgctgtttaaacaaaaccccgcgtgcctgaggcgcatgcggggttttgttcatcatccggcaagcgggaggatttgaatctcaaaaaatcgactgtccgcagatcatctccttgccgtactacttaaaaatcaagcacttgctatctccacacaaatcagtgtggcattatcctggttgggatccccgtcacggctgatgccgtccagtacggaacgcaccagttcctccgcagaaagcatggacaaataccgcatccctgccggtcccagggaattcagatagggctctaccccgtcactggccaccaaaagacggtctccgggaaccagagggaagcattcctcccgcaaatccatcaaaagaatttccttccccatcagggcagaggtcaaaaaatgccgggcaggatggttcaaagcctcatcccggctgataaccccttcatccgccatccggtccaattcctcggaatactgatgcaattcattaagcagaaacattttttcattccggataagtagaagaggggaatctcccacgctgacccagcacaccccttccctccctatccaggccgctaccagcgtcgttcccatttcgtcatcctttcctcctcttttccggacagcgagtacttgttcattcgcagcggccactgcggctttcattcgctctccgggagagagatattcccgttcaaatgccttggaaaatccttccacggcagcacggctggccagttctccgccggtatatcctcccatcccgtctgccagcactagcagaaaggcatcctctccaaccagaatggaaaaggtatcctgctggttgtcgcgggcgcccagaatctggtctccatgcaatccggaaaccagaaaaggcccttggcaaaaagactgctgtatcatggtaatacaacactataccacggcaggactgccgtaataaagcaagaataacgaaagaaaaaaagccatgcctgaagcctcggaatgcttttccagagaaacgggtactttacatgtcgcccaaagacctggactactcccggctccatgaccttttctcccgctatgcggcaggggaggaattttcccctctcaacaaggaatgggctcttgacgtccacagaaaggttatattaccaccatcgttgtcgttccggcaatcattgccgtccttgccgtcatcatcttcagttcctgaactgaaagaggcatttccttttccggatgccatgcatgagcaccgcatcctcagcacttccccagatacaccacagtttcatttggaaccgtaacacgcccctccgtttcaaaccggtcaaacagcttttccagggcgcccagccaggaggaccgctcttccccgccctccgtcaaggcataggaggtggacatcatgcggcggagatactgctcccgcgtgtaggacaaatcatttggaaagcggaatacctggaaacggtggttgaaaaacgctccaatgctgtccgtcaacttctccagccctccgctgaatccataaaaacacggacagtaaagacggtggatatttccttcctcccggacaatgggactgtcttccaccctggagttccaaatcagggctaccttgcctcctctggacagaagacggcggcattccctcttgaacgcggcggcgtcaaaccagtggaatgactgcgccgccgtcaccagatctactgaagatccgggaagcccggtccgctccgccgttcccgctacggaatgaaaacggggaaaagaggacagccgcctctccgcctccctccgcatgtcatcattgggctccacgccatacacggtccagccgcgctccagcatggcgcgggaaagaatgcccgttccggagcctatatccgccagacggggattctcccggcggctctcctgcgtcagaagcccaacaacggaggcgggataatcgggcctgccctgggcataagcccgggcttttccagtaaatcggtcagtattattcattagttttcagggtatggtttactccttttctcccgctgttccagcctcaatgccgtacccggctcaagaaaagccgccatgctgcgggatcccgggaaaaaactgatttgcccggtgaccgtcatgcagaaaggcatgcgggaaaaattgcgttccttgccccttccccggcaacatgggcggagcagtccctacagatggctttacaagtctttcatgaactcttagtatccggctcaggcccgcctttcccggattgcgtcctgactaccggaaaaaggaacatctgcgggttccatttttcagactgctccgcccatgttcggatattacagactcgcctcctccgtcccccagcttcgcgtggctgaagtggactacaatgtcgaccaacttacggaggaattccggaaagccgcagaacagcaggcggcagccgtcgttttcccggaactgtgcattacgggctattcctgcggagaccttttcttccagccgaacctgaggaaagcagccctgaacggcctgctccgctttacggaagccacggaaggctccggcacgattgccgtggtgggcctgcccttccttcatgaagacgctctgtataatacggcggcggtagtgcagtccggccgcattctggctctggtgcccaaaaccgtgctccccaactaccgggaattctatgaaaaacgtcaattcacctccggcagggaattgggtacaggggtgaaggaagtcacagtcaatgggatgcatatcccgttcgggacggaaatcgtttttcatgaagaatcttcccccttcagttttggcgtggaaatatgcgaagacctgtggagcgtcattccccccagttcccaactggctcttctgggagccagagccattctcaacccttccgcaggaacggaactcaccggtaaggccgcatacaggagggaactggtcagacagcagagcggcagatgcctctgtgcctatgtcctttcctccgcaggtgtgcatgaatccaccacggacaccgtattcggcggccattccctcattgcggacaacggcaggccagcagcggagggggaacggttctgcagggaaagcaccctcatctttgcggacgtggattttgaacggctggaggcggcgcgcctctctgaaagctccttcaatgacagcaaatcccttttccctgccgggaatgccctgcatctggccctgccggaacaggttcccggagcgcccggcctggaatacgctttcaacccggcacggccctttctgccttctccgtcccgccgccgggaacggtgtgaggaaatcatctccatccagacggcaggtctggccaaaagaatggaacatacctgcgcgcaacggctcgtcatcggcatctccggcgggctggactccacgctggctctgctcatctgctcccgcgcctgccgggcgctgaagcggccggcctcggacattctggccgtaacgatgcccggcttcggcaccacggacagaacgcatgacaatgccgtgaccatgtgccgccttctgggcgtggaactccgggaaatccccatctcggaatgctgtctccggcactttgccgacatcgggcacgatcctgccgaacgaaccaccacttatgaaaacgtccaggcccgcgaacgcacgcaaattctgatggatttggccaataaaactggggggctggtcgtgggaacaggggacttgtcggaaattgccctgggatggagcacctataatggggaccacatgtccatgtacgcggtcaacggctccattccgaaaacgctgatacgctgcctcattgaacatatcgcggaaggatcatccccggaactggcggccaccctcgcggacatcaacaacactcccgtcagcccggagctcctgccgccgtcgaacgacggcaccattgaacaaaaaacggaagacgtgcttggaccttatgacctgcacgactttttcctcttccacttcatcaaatacggtgcggaaccggataaaatcctgtacctggcggaacatgccttccgcggcgaatttcagccggacttcatccgccgctgcctcggcatcttcatccgccgtttcttccgccagcaattcaagcgcagctgcatgccggacggccccaaggtgggcaccatttctctttccccgcgcggggactggcgcatgccttccgacgcctgcggaaccgtgtgggaaaaagccatctcacactactgagacctcctatccggaaagccgaggggaacggcttttcccggaccccggtaagggagccaaagaccacatcaatgcccgggggccagcttcagcccgataatgcctatcagcaggaaggatgccgccagcatgcgccagatattggaagaatccccgaaccacagaataccaaccaggaacgtgcccaacgcgccaatgccggtccacaccgcataagcggtgccgatggggatgttccgctgggcaagccacaaaagaaaaccgctcagaaccatgctgaaaacggagcaggcgatgcaggcggcgaatttgccgggccctgtgccgggcgtttgagaaagtttgaaacccagaggccatccgatctcgcagagaccggccaacaccagataaatccaggacatatattgaaacggggaatcaccttccgctcaccggccttcccaaatgggaaaagctccaagggcaacggatgccttgcagaatacccgcaagcgtcctggaatcaagaaggcaactcttccacaccctgtcatacagaacaacacgggcatccgggtcggaatcccgcctctgtcctgtacaagttccatcgtggtacctgttacaggcaatctgacaaacggaaaaccgctacttcatgaagaaagctcttctaatgacaaaataatattgtttgacgcttctgtttacatgctccccgccatctgcctttaccccggcatgccggcccggcatccccgtattcagggataatcacggaccggcatcaaaaccggaaccgttacgacaacggcgcttatcacaaacaaaaaaggatcgggaaaagctgtttcccaaagtcccttcctatttaagtttcctgccgggagccagccctgtgtcttctccgtccgtcagccattcaatggtaatgggaacaaacttcagctttttaatatgctcctggttctcctcataaagcaccccaacgatgccgggttccaccatggcaaggctggaataggcaaaaccgccctcgcccagcaatttcttcaccggccaggtcttgccgttgtcatagctcatggccacctgtcccttaatgcgccggcccgcgctgggcccggaaaacagaatgcggcttttgccgccgtaggcaggctggtcgctcagggaatacgtcatcagggaattttgggtactgtcgcaaaacagctccggagcgtcttccacctgtccccaggtctccccgccatcctgggaccacgcaatacggcggcaattgcctgcgccccaatggcgcgcaaccatcaccacgccgccgttatccgtttccgcaatggacgtctcgttcaccatgcctttcatattggcagtcggctggcccagcttccagctcttgccgccgtcatcgctgtaaatgcaggaaatcacccatttgccgaacggcccttcattcatcggaatcaccaggcggcccttgtgggcgccgctcttcaactgggttcccgcattcgggccggacgccataatatccactccggaaggacgcttggtcgtcttcgtaatctcctgcggcttcgtccaggaagaacctccgttcctgctctgaatcatgaaattgcggatgcacttttcatcatcccatccgtccgggatattgggctgccgctccttgacgccggcagggtaacgctggaacacgacagtcacggttttggttctggcgtcataaacagggcacggattattgaacgtggcgccatgggccttggcaatcgcccggggacgggaccaggtcttcccgccattcttgctgacgctcatgataatatcgttctccccctggtcggtattcttgtaccgtccttcggcgaatgccaggagctggcccttgccgatactgagcagggcgggaatacggatggacgcatagggattgccctccccggcgctgaatacggtcacagccctgtccgtagggaaaccggttttctcttcctgcccgaacgccggcaatgccacggcgcatacggcactcatcaaacacttgaatacggagttcatcatcctctccaccttattccattttccccttccgcacaacaaccatgtcatgcatgtgcgtcaagaccagagaaaaaggaacataaagagaaacacgcggcaggaacgcaatactgccgccgggaagcccggaaggcttcggttcaaaactcaagaggggaacaaggaacgcgcccatccggatacggcgccccggaaaagcgcccgccggaacacgggaaatatccggaaacgtgaaaccggccgaaaaaaacctgccgcaacgccaaaaccattccacaaatcaaccgcccggcctttctcctgacggactgcctgcctatttattcatcaagagaaaaatggtgaaagaagaagaaaacggaacctgtatcttgtaacatcacggaaccacctgcttcccgtactgtcatgaaccgaatccttccattactatccctgcccctgctgtcgctcgcagcggcatttgccgccaacacgccggaacacatcggcaacgacctcaaactgttcaaagactcctcctgcacctccctgaagccggatgtcaaagacacttccgccttccagtctgacgcgatgaaggaactcgcggccaaaatcctggcgggccattacaagccggactacctgtatgccgaataccgggccctcccctcaccgcgccagacggggaaaaatctcagaatcggcgacggattcagcaaatacgacaacatgacgggcgtctatctggaaaaggggcggcatgttgtcctggtcggcaagacggaggggcaggaaatcagcctcctgctgccgaacctgatgcgcaagccggccgaaggagtgcagcccacaaaagaccccaatggctggggattgcacaaaaagcagattccgctcaaggaaggaatcaacatcattgacgtggaaacgcccgccaacgcctatatcagctacttcaccgaagacgccggcaaggcgccgaaaatccccgtccacttcgtgaccggcaaagccaacggctactttgacaccacccggggcgacaccaacaaggactgggttcgcctgcttgaccaggccgtctctccgatcatggatgcccggggaaaatacatccaggttgcctaccccgtagaattcctgaaaaaattcaccaaagaccgcggaaccgaactcatcaacgcctacgacaagctcatcggcatccaataccagctgatgggcctggataaatacggcaaaatcccggaaaaccgcgtcctggcccgcgtgaacttcaactactacatgttccgcgacggagacggagtcgcctaccttggaaacgacgggacaatgcgtatggtcaccgaccctgaaaacgttctcaagggcgatgcctgctggggattctcccacgaagtaggacacgtcatgcaaatgcgcccgatgacctggggcggcatgacggaagtcagcaacaacatcttttccctgcaggccgcagccaaaacaggcaatgaaagccgcctgaagcgccagggcagctacgacaaggcccgtaaggaaatcatcgaaggggaaatcgcctacctgcaatccaaggacgtcttcaacaagctggttcccctgtggcagctccatctttactttaccaaaaacggacaccccgacttctatcctgacgtcatggagtacctgcgcaacaacgcgggaaactacggagggaacgacaccgtcaaataccagttcgaattcgtcaaggcatgctgtgatgtcacaaaaaccgacctgacggacttctttgagaaatggggattcttcaagcccggaaaattccacatcggcgactatgcccaatacgactttaacgtcacccccgaaatggcggcggaaacgaaaaaatggattgccggcaaaggctacccgaaacctgaaaccgacatcaccgaattaagcgagtaacgagattcggcaatcccgacgattccttttaatcatcaaatatgctgcaaacggataagaaaacaggggctcaagttcaattcttttgaaagtatttttgatgatggaagattattaagaagttaaactccctcaccaaagggtggaatcagcaatgattccaccctttttcatttctatatccatccccctattcccagccatactgggtacgacaaatgtcaggtacccctaaattaaatgtattcccccatttgatagcctacccaggaattgatacaatcggtagacagctcctattttgatcagacatctcaacaggaagtaaaatacaatgctttttgatgaacccgctttagctggctcgtcatccgtatagcgatggggggatagcgtgcttccctgatggtcacaaataaaaaggtcgtttcccttgagaaaggaaacgacttcagaagagcatctcagcagttttcctttttgagtgaagagaatttgcccttcagaggatattacctggacaaatattccttgttggtatgcagctccgatcatgaatccaccatgtcgcgaaacatgggctttatacacaacaaagctccatgacagtcaattgttttccccacaatctaataccgcttgatgaaaatattcaagactggagaggaagaacgactttacgcgttttcgaggaatggggggactccggttgttcgttgataagagaggagatggaccgagccaccatgtctcccagggatatcccctgctgggacgccttggcttcaagctgcttgtaaagttcaggggaaagtttaaccgacagagacaaggaaacgtctacctgaatatcgggaatggaattgggagatgatgttggttgcgcggctggcatctgaaccatcacccgttcaatcagctgttgcttcaatgggggaattatcttctgggacatccaattgcgaacagtaatttcagaaactccgcattggtcagccatccatttgtaatcaagattttgctctttgagccatcgtttaactcccatcttgaatatggattgatccccctcttgtttcatggaagggattttatcacaattcccggaaaagacaaggcaacaagcatctctgttggagacatgaagtatctattagaggatggaatggagatgacgggcaacgagttcctcaagggaacaaccggattccagggctttgcgggacaattttgcatgatcctccagagatagttcgaacttgaggccgtcttccctgtttccttcaatgaaggaaactgtctttctggaggactcaaccatgctcttgaggcaatgggaaaatctctcgggaatacctttttgagatatccattgacgtaccgtacgctccgagactccacaggcaaacgcaatacttgaataactcaatccattgtccatcatccatttttcaaactccttcgcagaccgaacgcctgttccatgcgtcttcatgagaggaatatgccacaagaacaatctcaagtaaattatctttttgagatattaagtgtttacaaaaatctctttaggagacatattactctctccacctgagaattccatatatggccttatggagatttccgacaaaaggcagaacaacgaaaccgatacaaccatggaaaacaacaataatctaacacaggaagatgaaagagaaaaacttctaagagaattaagcgtaaaggctgaaaaccttagaatcaaatattctgagctgtcccctgccgaggaaaaggaattaaacgatatattgggaaaaatagctttattggagaatcagaagaacaactgattcttcccatgtgatctgcaaccactcaccaaaatcgattatgaagccacatctgcctacaatacttctagcggccgtgcttgcctgcatttcgcaaccggtcattgccacggaaacaatcaatctgaatacccatgactgggatcaatatgtcggaaaaactcccgaatttgataacgtcaatctgagccttgatggcaattggtctgttaatcttgataaatttcacgacccatgctggggatcaacggataacggttcctatacgttgacaggacaaggcactatggatttcaaaaatgacaactttattatatgtggaggatcttccgattggcctgattcagctaatcctcctactggcaatgcccaatacaccatcagttctggcatcgttttaaaaaatgtatcgttagatgcacaattaggagcgcaagtgaaattcaatggttccctcgaaacaagcagcaaggagtcctcctgctcattctttgttgattctactgttgatggcccattatctatcattgatttgagaaacgcgacgattaaagataacgactttgttaatttggaattttgtcgaggaactattatcaaagatcaatatactgtatcaactactcatggacttaagatctggaattacacttcatttgaagggagtggaattctacaagggaatctcattctttcggacggaggagaggttgctctattggactatggtcgtaataaatattctaatataactgtaactggaactttatctattacagggaatacaacaattgatttccactgtattggtccagaagacagtctccttagtccggagacggggacgattgtattttactgtaaagatattactggtgaaactagtcttttgaagattactgaaagttatggtggaaccaccacagtttcccgggacattgctgacaagaagttcgtttccattgctcaaacagatggacgttatgccctgacgctggttgacaatgggtacgatcccggggaacctgaacaaccgggaaccattattaccgacggcaaggcccccgataccctttccaaggatgttgtcgtttccttggcgaacggcggcaatgttgatgcgacggaagttacaagcggactcagcaattcctatgtccaaggaacgggaggaacattggtcaccagtagttcacaaacatttacgatgtcgggatcggatacactcggtttcaacatggtgggaaccgatagaaatgcaggcgcagacattcaagttggtcaggcaggaggaagtattaccgatgccgccattgttttgacgggggacgaatacgaatccaatcggatcaatgttcagagcggtcttctggaaatcggtcaaaacactgttcttggaacaactgattccgtgcttactgttggaactcccaatggttccgaggatgcagttactgcttccgtcaacaacaggggaacaatcaacaatgacgttgccattaattccggtgcatccctggacaacaggaataccatcaatggagacgtactcgttaatggatcatccatcttgagcaataacggggtggtaaaagggatcgtaacggtatcggaaaacggctctgtcaatggcagcggcacctttggttcaaccatcctccaatcaaatgcactactctatgtcggtaacagcccgggattccaaaagcataacaatctgactttgaataacggttcgaggctcggtttctatctggacggaatcacagccgctacgtcgtccaatcacggttccggaacctattccaatctttccgtgaccaattcccttgtggttaatggaacggtgaataccgaagtggaagtaggccttggaatcctggccgcagggacggaagcgtttactcttaacctcatcaaagccaatgggacggggtcggtcagcggtaattttgccctttccctgaatgatgaacaccatctccttaaggaaggccatcttttctgggattctactaccgggacattaagtttcactggacaagttgacgaatccgttgccgccctgttgagcggaaaagacggttccaatatcgccaacatgctttggtccagtacgaacgtcgtcaagagcttcggacaaacagctgcatcccagctcaaaactgttcaaccaggagataccaatgcatgggtaagcggtcttggtgattttatcaatatgaactcaacctcgcacgcaggaggattccaatacaacggaggaggttatgctatcggtattgatcacgcgtggacggaaaaattccgtgcaggcatcactttggggcagacgttcggcgttttcaagacggatgaataccaggcaggatccaagcagaacagcatcatgggcggcctgtatgccaattaccttgcccccctgtgtgacaggcagaatctggaatggagcggttatttcgcttacggttccgttgaaaacagaggttacacgctcgtaggaggctccaataatcttctaggccagtccaaatggaacgacgacgtatttactttcggactcaaagccgattggaatatcaaggtcaccgagaagacaacgctgactccgtttgttggaatcgattatgttcatggagcgcaggaaagcttcacggaaacgtataccggcggcaaccgccagtacagggacggcaacatgcaagtgtggagcgtacccgcaggtgttaccgccaaaacacaagtagccttgggaggaaaccaatatcttattcccgagctgactgtctcctatgtgggagatgtctcccggacgaatccttccgtaaaatcctccatttatggagttgaagttaaatcggaaggaagcaatccgggcagaagcgctttcatgttgaacgcaggcgccaactggatcatcaaccaaaactggagcctgggagcattctacactctggaagccagaagcagccaggtgaatcaatccgcctcactttcggcaaggtacagcttctaattagacaaataacagttacccaaggatgggatcagcaatggttccatcctttttcattttacaccaatacggaatccccttccatacagggtacagcaaatggcaaggcacccccatctaatcaaatacactcccccaataactgcctatccccattcttcatcaacatatacagagagacttccacctgaagggggtactttcccaaatgcttcggaaatgtttttctcaaaaaatgaaaaatttttcttcattaggaaatgtatcaattgggaaaagaggaaagtccatttagccctttgtaaggcaaaattattttttacggtaatttttcagatttacgtaggttaatacccatcattcctctggaatccttacaaatgatcctagagacattcagaataaattaccctccacggacaaggaaaacaacgtacaattgagcggaaacacagcaccatccctcaatgaagattttgtacgaagccgtttttaattaaccatttccctgtattcacttaaactatcctcatcacttggaatcaaaggaatacaggataattaattctaaattgattcctacggaaattattcaggaaggaatgtaattggtaaggggaagtggttacaaattcgaataatcaattctggggatattcagaataaaataacctgcgtatagatgatcctccatatactgccatctgcattttccaagacatgtattcttcaaatgatcctgtacaatggtgtaatgaaggaatataaaacatgtttaaaatttacaaatatatcgtaatgagcaagttatgaaaatatgacctcatacgatgtatactaaagataaaagagagagttttcaaatgtatacctagtattactcccagggaaatttttcaaattcacaatcataagaaaattaataaattataagaaaaaatctcactcaatgtgtgaatataataaatgatagaattcccaaattcataatgatgtagacaaaattccaagatttccaaagtcaattaactttgtacgaaggtgtttttaattaaaatcattccaaataattaatcctaaaataattcctgagggaatttctcagaatatagaggaaaaacttagagattgctgagagagtcctagatgggtcgagaagaagaacagtcagctatggacagtgattcagaagcagagaatcctaattggagcaaattttggagccccgattctagtccaaatgatcctcatgagtttggagaatgcatggaggattgcacgattatgaatggagaaaggaacagaaggagatggattgtagaaggaaagaggaagagtgggagagatcaattgaagaggtagcttctaatcagtgatatcagttatttctttctctagcaattgaaatctatttttaacattttctcccatataaaaatcaagtaaatcttttttatttaaagtgccttgttgtagaaattttttcatatattcctgattaaattccatcaataatatagatttttctaattgtttcaaaatggttttattgttttctatatttttatatacaagtgattttatagatagaatttcattgatatctttgataattctgcttacaagaatcgctagcaaatttttatccaagtcgatttgtcttgcatttaatacaatatcacgagccagcatatatgcaatggctaaatttgaataatcccccttttgagaatctacaataacagtaaatccaatatttgagatgtaaccaacgttttctgaaaatttaagtattgaattatctactaacgatcgatcaaagacgataatactcaccttaccatctctatttgcttctgattcaattagttgactccatgcggcatctgtttttcgagtaaaaatatctttggaagtaatatctcctaagcgagtgcttttgtcaaatttacactcaataataattttcaagttatcattgccattgatttcacaaacaaaatcccctgttttatttttagaaatatttcctattgtatttccagtgaagagaaccctatcatccaactgtttctcttgaaaataattactcaaaaaatcagctatttcttcctctgctaagacaccctttatactagatttatagaaaatttcttttttcatttcaaaaatcatcttaaggctctctaattctgtgcccaattcattagatgtttttgaaaggaaggcggataaacgatcttccattagcgctaatacacctatatacagtgctttcaaaaatttttcgcttctttctgtatatggaagcgtatcaaaatatttgaaaactatttcattttgtatttcaaaatcttcaatctctaccctttttagttgttgattaatttctaccgatgccattatattcttgaatatctataccttccttttatctgagaaacaaaatacttaccatgagaaggggcattcattaatccttcgtattcatgttgaggaacatcatagtattgatatatgcctccatgtttaaattcaacttctagcgtttgactagaggcatcatagcctatagaagaaatattcgatgatgtaactgattgtctatccatttttattatcgtgttgagttcttaggtgtgggttttgcgatctccatactgctaaaaaatctttgaagtcagatgcttgttccttagaagctccccatccctgaggttttgacaaaccatctgcgctttctacttcatcatatataacaggatcttgactatctggccaatgatttctaggaggaggctctataaataccctcataggaagttttacactttctcctaaaataattgcctcaccagttttcagaatagggagcatgcttgtaagactctccaaattatcacttacagcggagcagatatgtcctctgtctgctctatttgatagtctgagagaaataaaagtgccacattgagataatactgtttcactgatttcggaaggtcgttgacttactatcattactcctattccatattttcgaccttctttaactattctttgaacgatatgggatgcagaattctttgtattactacttaggtaattatgtgcctcttccataattataagaaggggtctatgcctgcctccttgcgataaatctcgagtccaaaacaaggcatcatataaaattcgcaataatactccaattattgtattaaggatagtagtaggaattcctgataaatcgaatattgtcactggtctttcattaccaatccaacctttaaataactcatctaaatctaattttgtatttccatcaagactaggttcccaatctccaggagaaaataaaaaattatattgaggaattctaaattttgctccgagagaaattaattgactacttaagttagcgccattaggcatgtaatagattttttctggatcatttgcattatttttaattctcttaaatgtgggaggaatacctatttgagggtctcctttcatttccttgccattatcatccagttcatatgccaaattatctatcggagccccttgatttctactataataggtacccaatgtttcctgatataagttataccatattttttttatactaaaaggaatgggtgtatctgcattaattaattcttctgaaattacactctttcgatatagcttgaaaacattttttttctctctcaatatactttctagaatcaatgtttttgatttttcatctactactccaaaacaaatttctattaattcgtctgcatttaatgcccaaaacggtaaatttaattctttttcatttgtctttatgcaatttgaatttattttgaatatatttgccctatcccctaaggcatttgcgtattctccatgaatatcaagtacaattattctagcagatggatatctaatatcattagatagagcattaaggagtcctgctacagttgtggattttcctgctcccgtcgttccaaccacagcagaatgcctgataattaacttatttatgtcgagtagtgcagggatagattcagctccagcaatatgacctacttttacgaaatggggtttttccaatctgccatagatgcattttaagtctttctcagagactaagtgaacctcatcgcctatcgttggatattgagaaatgccgcgatcaaaaccagttttatgatagctttcaccaattaattgaatagtcatccaacggtttccatgaggttggctttctatttgattatccggagctgcattagctcccacttttgatactattccaaataagtcattataacctataggaattcttacaaaacttccaacttgtcctattttatatacttctccattaacatatgttaatcccgaggcacagtccattgacagaattgcgctaactgtcgctccttcaacattttgaacttcacctatataagtagcaactttagtcattttatatttcttctgaagatctgcctattaaggatcttaaataattggaaaatgtaataaaatcacccattttgaaatatattttttcattttcctcttcaataaattcttcaaattcataatttatatcattcgcttttctccatttacccctgtgtgttcctattatggcttcattttcagcccatataattaaattatgtctcctatttgctatttcaatgcttttaggataatattctatattcccgtataggagagtaattactagagcagatgggtttgaaatgagtgcgttggtaattgtatcatttatatgttcatcattgaatgaatatccgcaaacgattaatgcagaagatgttttttttaagaagcaattcaattgatcagatagagctaaaaaaggcatctttctactttgatcatattttaaatgagagggatagatgaggtaagaggattcagagttgtcatatttatcagatctaaaaatctttccattttcttttttaaaccaatttattgatccatgcattttccacagccttgtccaatgcctaggaataagattatcttccaaagacctcaaatcaaaaaaagcttcccttgatcctacaaaaccatcaaaataaggtatatttgtgtcttctaaggcttgctccatcaataaatcataatttgttgtaaatatttctatgggttgttctctatcaatagaactaatccaattcgctaacttatgatacggagtattttttgtcggtaaatttacttttattttttctacgatatgcttacatatttccttttcaagtgttattaattcttcttccttaaaattatttattaggttccctttcgatacacttatgagagatctaataaaactaagtattttctccaaatttggagaatctccttcattaattggatttatttttttaaaaacctcaataaatctatcataaacacttggattagagtcgtcatttgatgttaaattttgctgaacatattcttgcaatcccttcatatcgggaataagtggaatcttattttcaatttctccacattttatcgataaaggacagccagccgatatgaaaaaaccaattgggtttttatcttgagacagaatttgagttagggcttttaagtgtcttatcggatcatgaaaatattcattttgaaggaatcccatagctcattatcaattatcaattttataaagcaagcatatagttatgctattttccccatttcttcctatgttcaagcaaacacaagtctcgatatactcatgatgaatatattacagtagaatattgatggcggacaggaatatcctgaaatatcataatgcgttttcagagaaataatttcctgcgtatcaccgaaaccctgtagattatcctgtgtctctgagtaatgttcttggaatgccacccaaatagattatgctttagggtttctcattgtcaatacctcctgtaggatttctgatggagacagcaataaaaggattactcgttttcccaatattttccccatactcctgcaaacaaaaaccgcaatatatccattacgaatatattgcggtggaaaattgatggcggacagggagggattcgaaccctcggtaccggtttgcggtacacacactttccaggcgtgctcattcgaccactctgacacctgcccgttggagattgtgctagataggaaagcaagggcagaataatggcagaagagaggtttggcaatctttttttcatccggaaggaattttcccgtcttcctcgagtttttcacgtttccggttgttgctcgaaaaggatgaaaagcgccccgacagcgccccgacaacacgaggaagtcttcaacaggcataagcagaaacaaagcgtattttgagaagtttggaaagggacaggtttccgtggttcacaaaaatcctccatgagagtatggcagagttcctcccgtcctgccctgtttttcccgcggagcaaacaagaatttttctctttctccacctttacggcttccgggcaatcgggcaaggttcaggtaagaacctctattgataagcttgcttccgtccggaatcaagaattgatcataaaacgtttaggaagtttcaaaaacgagacaggaagagaagattgacggattccggaagcccaaggttccgggaaaacgcggcagaaatgagaacccacgctgtaaggagagaaggcgggacatgccgttcaccgagtatcatcatttccgcggctccgcattcctcccgtcctcaaaaaaggtcaaaggcttccggcatgtcccggaaaaggcgtttcccgaccgcacttcccccttgacggatgccccaaagacgggtttgctagtcctgcgcatgggagagtccttttacacacgcaccacggaggccccctcctccgccttcgatttgtccctcagaccgcccgctttcagcgagttctgcggccaggagaagattaaggaccgcctgatgctgatggtggaagccgccagacagcgcgacgacgtgctggaccatatcctgttgagcggcccgccgggcctagggaagacgacgcttgccaatattatcgcgaatgccgtcggctgccgcattcatacgacttccggcccccagattgaaaaggcgggagacctggccggcgtgctgaccaatctggaaaagggggatattctgtttattgacgagatccaccgcctgcacccggccattgaggagtatctgtacccggccatggaggatttccggctggatattatcatcgaccaagggccgaacgcccgctccatccagctcaacctgcccaagttcaccctggtgggggccaccacccgcgccgggatgctgaccagcccgttgcgttcccgcttcggcctggtgaaccggctggattattatacgcgggaggagctgtgcgccattatcgaacgatccgcggggctgctgaacgtgcccgtggacccggagggcgccctgcagatcgcgctgcgctcccgcggcacgccccgcgtggccaattccctgctgcgctgggtgcgggattacgcccaggtgcgcggcgacggcgtgattacggagcagttggcgcacgatgccctgaccatgattgagattgacgacgacggcctggacgagatggacaagcgcctgctggaagcgatgatttacaagttcaacggcggcccggtgggcctttcctccctggcggtggccgtaggggaggacgcttccacgctggaggacgtgcacgagcctttcctgattatgcaggggtatatcagccgcacccccagggggcgcgtggcgatgccctccgcctatctcaagatgggagccgcgccgcccgccaacggccaggggtggctgttgtaagccattcatttacgacatgaaaggagtcctgcgttttatgctggtcatcaggccctctttcttttagactgtttccacataaaacgtcaggacgttttctgttcatcatacgcccaaagctatggccgcacattctgatattccctttaaaagactgcccgtcaagattatcggtacgggttcctatgttccggaacgccgcctgaccaatgcggatctggagaagatggtggacacttcccacgaatggattattgaacgcacgggcattgtggaacgccgcatcgccgcccctgacgagtacacttcccatatggggacgaaggccgcccagcgcgctctggaatcctgcgggctgaagccggaggatattgacctgattatcgtcgccaccatcacgccggatacgttcaccccttccacttcctgctacatccaggatgcccttggcgccaagaatgccgccgcctttgacatttccgccgcctgctccggcttcctgttcgccatgaagaccgccgttcagtacatcggcaccggccagatgaaaacggctctcatcatcgccgcggaaaaactttccaccgtcgtcaactgggaggaccgcagcacctgcgtcctgttcggggacggcgccggggcagccgtgctccaggcctccacgggggaagagggggaaggctccgtccttgccacggatatcggttcggacggctccctgcatgacctgctccagattccgggcggcggctcccgctgccccaccacagcggaaaacgcccatgaacgcctggctaccctggccatgcgcggcaatgagaccttccgccatgccgtcacgcgcatgaaggcttccgccgccagcgtcattgaacgcgccggcctcacggcggacgatatccagctgattattccccaccaggccaatctccgcatcattaacgccgtagcgcagcgcctctccattcctgaagataaggtgttcgtgaacattgagaagtacggcaacacgtccgcggccgccgtcgccatcgcctttgacgaagcgcgccgttccggcagattcggcaagggagacaacgttgtcctggtcacattcggcgccgggcttacctggtccgccgccgttatccgctggtaatattctttttcaccccccctccatcatcatgaccactgaaccatacggcaaaaaaaatccgtttcccgctcccgtcctctccgtcaggcatatcaccggggaaggcagccccaaggaaaccatccacattgaatacagcctggacggttccgggatgaactatattgccggggacgccctggccgttattcccgccaatgacccctccctggcggacgccctgattgacaagctcggcctcagcccggattcccaggttcccacgcccgaaggggaaaccgcaagcctgaaagacgccctggttcactgctatgacattaccaatgtcaacaaagccctgctgatcaagtgggccgccgcctccggcagccaggagctggacacgcttctggccggggataaggacgccctcagcgatttcctgtggggccgggacgtgctggatctggccacggaataccccgcttccttcgaatccgcggaggctttcgtcggcatcctgaaaaagatcatgccgcgcctttattccatcgcctccagcccgaacgcccatcccgaacaggttcacctgtgcgtgggcgcggtgcgctatacggcccgtgaccgcaagcgcggcggcgtttgctccacctatatggcggaccgcctccagccgggccatacggccagggtattcgtacataccaacaagaatttccgccttccggaagacggggacacccccatcatcatggtgggccccggcaccggcatcgcccctttccgggcattctgggaggaacgcgccgcttccggcgccaagggcggcaactggctgttcttcggcaatccgtacaaggccaccgacttctgttatgaagacgagctgaaccagttgaccggcaccggcaaactgaagttgtccgtggcctggtcccgcgaccaggaaaagaaggtgtatgtgcagcacctcatggtccaggaaggcgaagagctctggaaatggctggaagccggcgcctgcttctacgtctgcggggatgcctcccgcatggcgaaggatgtggacaacgcccttcatgaagtcatccagacctggggccataaaactccggaggaagccgcggcatatgtggcggatatgaaacagcaccgccgttaccagcgggacgtatactaattcagggcctcgcccctgaacctgtcaccgcgcctttccatcttttctggaaaggcgctttttctttttccggagaaaaaccgccacgtatcaatccagcttctttcgagccggagaagccatcttccgcccccctctccatcaaaaacaacgccggaccggagagaacccgtccgagcaaaagttcccctccttcttcaagcgtttccttacccttattccaaatcctgccgggcgccgcaaacggcccgtttcactttcctaagcttgaaaaagaagaccatgcaaaataaatacagcttttgcggcaaacaacgggctatacccctttttcctggtccttttaaggaccatctttgagaaaaggaataattccaccaattctgcaactgatcaatatagcttatcttttttctcctctcctctatttcagcaagcaattctttccgcgaacgaaagaccagaacaaagctctccagcaactcaccgcacagtttcatccccgcttctacgctttctttcaactgctccaacattactaagtccttcctttcaaaagcctctgccgtctgcatgtcggcaaaccggaatgcgctactgacagcggagatattttgtgctgcaaaacggtaataacacagagccgtatccggcaattcataaatattaccctgcaaccatgcgtgaaatgccattagatcatcctcaaaattagccgttatcggaaaagcatttccccactcgtatgcactttttctgatgatcatagcaagtccataatgagctgaagaagaaaaagccccttgttggagcacgacagccggcatttcccgtggaacggagggaaatgccgggaattcaaacgcaactcccggttcctcatagacgttaatcatctggctgactacagccacagcatccggatactccatcactgcccaggcaaaaaacctgcatctccaggggaaggaacaatcgtccccatcctgacggagaatccattcatgggaagccagaccaaccgcctgccggatatgaggcccgcgccccagcggcgtttcattccggttcaagattacccggtacggccccctgtattgagccgccatttcctgcatgacggcgaaggttccgtcggaagatccgtcatccgaaaggatgatttcaaccggcccttcataatcctgcccgaatacgctccggatggcatcccggatgcaatgctcctgattatgcccggtcaggataatgctgatggaagggagtcgcgaagaattcatgaaaaaaagtgcagaaaaggaagtgaaaaaaacgaaaggaatattgctcttccccgtttacatataagacatcatgttcataccggattccaaatccggggtcaagggttgatttttacaccaaggaacttatgttgcgcggacgttttgtgatcaagaatctccccccttgcgggcgggaacccgaagccggtaaaacaggacgaaagattctgctttcccttactgctcccaacacacacattttttcataagcaattattttttagaatcatagaactcttagaaccagacccagccggaatacctccacaccccaccggttccatgaggtcttgggacaattctctgtccattcatgctgaacccggaatttcccaatcggatttggaattcgctatgacaggttcattcgcgcgctgatgaatcatgggaggaacaatggattcgtccccttgccattcaccggttgcgatagttacaaccccatcagaatcatgttctccatatcctggttcccgttctattcacgaagcagttcatcattccccttacatgcagaaaccgttcttcagcattattatcccggcctataatctggagaattatattgctgccgcccttcagtcagtactggttcaaacatttcaggattttgagatcatcatcgtggatgacggttcttccgatgagaccgtttccatcatccaatcttttcatgaccccagaatccgcctggtttcccaagttaacggcggcgtgtctcgggcgcgaaacgcagggatgaagaaggccgtgggggcttacatcgctttcatggacggagacgattactggtatcccgagcatctggagctggcagccgattttttcaaccgtcatccggagatattggcctatgccaaccgctacatgagggatgaactggaggccatcccgccacgccctccatcttatcccgaatctatccggaggctggggatccggggagtgcttttcatgaattccagcaatgtaatcctgaattcgtctcttgcgtcccggcttcccccctgggaagaaacgatgccctatggggaagacggcctgtactggacacggtgcatgcgggggacaggactgatcgggctgggaggctccgtcacctccatttacaggcagagagcttcttccgccatgcatgatgaacattatcagcatgtctccctccactcactcattgcgcctctgctgaatgagcttgaagccatgaaaaatcccaaatggcaatttgccgttcattatctggtcatcagggaattgcatcccaaaagactgttatcgctcaacgtagaagaacggatttccctgacgggcagaatcaggaaaatcatgcacccatgcctgaaccggccgtttttggactcctatatgaaagcgtgttccgcaagagcaggcatggaacaatcattttccgctctcatggacagaaccatgttctcctgcaaatggctggaccgcctggaaaggatgggacgcttcctgtttttccggttgcaaaccaataacggaacagagagcaaacaccaagatccagtccgttcacgatcatgaatatcgtatatgctacagacgataacggcgcgctgggaacgggcgtgagcattgtgtccctcatggagaatttgccgctcggcgttcatgccgatatttacatcatgactgacgggttaagcggggataatacggcccgtttccattccctgcaacaggactacaatctccatttgcacttcattgacatgaaggataaatatacggatttccccgtcggttccaaatggtcggcggcgacgtattaccgtcttggcctcgcaggggaacttcccgccacggtagaacgcgccctttacgtggatattgataccattttcaacagggacataagccccatgtatgaatccgaattcggagattgcctcattgccggcgttttcaccacggaagatttatccgaggaatctttttcacgctggaagagagaaatgaatctggaccgggactccatttacatcaatgccggcgtcattctttaccatattggaagaatacgcgaagaacgttttgaatcccaggttttctcctgggcgaaaaacaatattcaccgcctttcctggcaggatcaggatattctgaatgtatgctatcagcagcgtatcttgttgcttcaccccatgtggaacatttgcgacggggctatctggtccattcgctgggaaggcgtgacaagcttcagaaataatcccctgaagccggcagacctgctggaagccgccaggcggccgggcattatccactactggggccatcccaaaccctggcatcccaacagtattcgccaggattacggattgttctacaagtattggaagaaatctccgtggaaagatgacatcagggatttccggaagcaaaacgatcccggacggatgttcatctccaaaatgagatgcctcctgggaaagggaaaacggcttttacagggcaagcatcaatagaaatacggagggggggctttatattttcctgatgcccagcctatttactgcgccgccttttatggggaaatgccagagccggctattttttaacaagccgacttaactcccctccggaattttcccgaatccgggagaaaccgtccgcatatgccttcaggaacgcctcaacgttttatgcctgatgattttcccggagttttatcaatagtaaaaaaatcattcatttatgaaagttgataccattaagggaagttcctatgtcatgacctgtacaaaagcttgtactgtaagcgccattttcaattccggagagacgtccatgcttattctggaagcaggggaaaaagggcaatacggttttgcggccccgacggacgccatagaagtatccgatgaagacgctttgatcacccaggttttcaaaacagccgttccagggctgccgggccagaacggcatcaggcaaggagaaaatgccgaattaaaaaatctgacggctgagtccgggacttttgcaggggccgtcaacgccaacggaggcatcaatatcccgctgaccgtgggggcggcaacggatacgtcagcggtcaaccgcctgtacgccgccgggttggccgccgtgacggacgctttttccgtcaggtgttatccgctcccggcggattgctcgtcttccaacgggacggttttcaaaacagacaaggaacccaattccctttatttcaatgtccctcccaattcctcttttaccgtgaaatgcggcctcgtgaccaacgcgaggcccatgcacaattattccagcatccgggggtgggtggctccggtgcgccttccggctgtcagcgctaaattcacggccaggttcggccagatgacaacggtcgtgcgcatgggaagggacagggacgcgtttacgctggtgccggatcaggcggctggcggctacaggattggggagattatcgatattacgtttgatcatgtccgggacgcggacgcgggagggtatcatattcgtgtccgggagatttattattccaatgccgagcagaaatggaagatgaagacgacgcaggccctcgcgccggagacgtcttccaataacggttatcccgtctgcgtgtacgcggtggtttacgagcaataccaggacggaggatatgataccgaagacaggggagcgttgtggctgctgcatggcgggaattccacccgcggctgcgtcaagattgccacggtgaggggagtccattgctttgagaatatttatcccttttccggatattatcttgatatggagaatgccaacagctgggcgttggccggagcgttccttccggcgacgatgcacttgcattgcaataacgtcaatccggcgtattacgggttttcctccatggagagcaatatcattgtctccgaggcggtggaggattttgttgatccggaagccgaaacgactaccgaagattgagcataaatgacgcagcgtccccattcccgatgcccggcaacacctctgcgtccctattcagtttttttccgccacggcaaccgggttcccgccatctccagcgcacggcgcaccattccgcgcatgccctgcgtaccgcaatacattaaaagaaccgtcactccgccataagaaacggccatgaggaaggcgcataaaaaccaggaaaagaaagacgcggaaggctgcaggggaacgaatttccagatccagcccatgaacacggccgaaatcgaaaccagcgccagctggtaaccgaattggaaccagtaactcatcacattttttctgaatccccagttatacagcatgaaaggcttccatatgcccacaataagtatcaggctggagatgccccccagcaaaacgccgggcaatccccataagtaacctcctatgatcgccacggaaatgttgatcacgctttccgcaagaggagcccatacatcccagaacaaaccgtaaccgtataaaaactgatccacaaccccccgcgtaatggtgatgaacagcctgataacgagcagcagcatgatttcccggggaaggatatattccgcccccagccaaagcgtgatgaatggctccaaaagctggtaaaaggggaaacataccgtcccggcaatcagcatgcgcagggaaaacaattcactgaacaccttgcggatttttcccgcatttccctccgcaatcaagttgcccacaccggcttccgtactgccgagcatattattgaccagaaggtgcagtttctccacaacggtggaatagttgccgaaataggccgccatctggagggaaacaaaggcatataccaggaacggcgtcacctggaactggaaaaagcttcccagccgatgcataaacaactgcttggtgtatttagtgacttcaggatattttttgaacagctccttccccagggccacattgctcttcagccagggatagacctgattgatcttccaattcaggatgaaggaataaataatgccgaagaacagctctatccctatccataaataatagcttcccgtataccatgcagacagcatctggcatatgattttgatgatggatgccgtctggaaataaaacgccactacgtaattcctctggtccgctcccaaaagggtctgcctgtagttggcaaaatacccgatcagggaagaggccagaaaggaataataagcaaaatagatgattccataggaaaaacctgtggaagggaaaataaccggcaggaaacaggaaagcgctactccagccgcaatgattatccgccctatccaccggtacatgtatcccagcacggagataatttcattaatcctggtctcatcatgttcaaaaatcggcttgtaaagcacatacccgatagccgtgcttatgccaagttccgccaaattgaggaaattcagcagactcattaatgttcccgtcaaaccgacaaaatcggcacccaggcaattcaagaatatcttccttgaaaaaaaggaaatgagaagaatcaaaacataaaaaatgagattgaccctggcgttcaacaggcttttctttacgcgggattcttccatgttatttattccatcaaccttatcctttcccgggagaagttaaaaatatctgttttattaataaccggattatttattcaaccggcaatataccaacggcatattgcggccatacgggtacggaaagcggtgccaatctagcacaacatcctgccgcatcaatatctttttacgaatcctcagccaacaggccctcacaggggatagaaaccgggcagaatcgcctgttcccatgacgccttcttatccgctcatcggttaaaaaacaaattcctcatttttacaggttccatggaccggaacagttccataaagtgtccttgttttatttcttcttttcatctacattaccgtccgtgagcaagggcaggattctcatcgttacatatgtttttcctccggaggaagaaggcgtaggcatggctgcctatgaaatggcctgcagcctgagctctctgaactgggatatccacgtcctcacccgcccgctggattcaccggaggagcctttccgctcccgcccatacagccctctcacaaccctgccggacaccctgacgaaggacagcgcccgtttaagagaatacctgaacgggtttttgaaagatttccggccggatgttatcatttaccactcctgggcggactggtgccgggaagaattgctggacgcggcgcgggattcaggcattccgtttttcctccgctcccatggaacagctaccaacttccgctcttttttccaccttaaccatcctccttttttcggcttgaaaaaatggctctgctccttttttcaaatacgcagggatatcctcaacgtgtgccggaaatcaccgttaaaccgtctcgtttttctcgacccttacggaacacttttcaagagctttgattattactgcgcatccagacgcaaacttgcccattactcctgcattcccaacacattcccggctctgaaaagaaccgctccttttttccgggaaaaatacggactttcctccgcccccgttttcacctgccccgccagcgccagcatgaggaaacggcagcttctcttcatccgccatgtgaaacgcacccatcttcagcagatcacgtttctttttctcattccccagcgcaattcctatgcggaacaaatggaacaggctatcggggatgaccccagattcaggattctctacaggctcccgcgtccggaggtagaagccgccattacggaaagcaatgccgtttttctttactccttccaggaacagcagcccctctccattctggaggcgatgtcatgcggcgttccctggttcgctccggatgcaggagccctttccaccctggaagggggaatcgtcctgaaaaacgcatccccctccgcgctggaaaaagctgtggaatcgctgacggacgaaacaacacgggaaacactgggacgtaagggcctccggcaatgggaagcccgttacgcccccgacgcagtaaaccaggaatgggagcaactgcttttttcctccatccgcccggaaggaaagcctccgttcgcgtcttccatcgtccgggagcatttacccacctgctaaccttgcctccttttttccaatccatgccgaccaaacgcccccgtcccgtattagccatagcagcggatctccctctgggccggctgctgacgtctttccgcaacaaggaccggcgtgcgattccctggattttttcccttttccatgccctggaatctcaggaagattttgacatccactggattactctcagcaaagccgtttccgccgcggaaactatccggatgcgcaaccagaccatccatattcttcccctgggcagcatgggcaaaaatatcctgacggcccatttcctgaccgtccggagaatacgcaagaccctgaacgatatccagccggacctcctgcacgtatggggcgtggagcaggcttacgctctggcgggggttgctttccggggaaaaaagctcctttcctaccagggggccctcaccgcctgctgccagcgcgctccgcaggccttcctcctccatatgcaggccctttgggaacgcatggccgtcaaacattatgatcttatcacgtgcgaatccccctgggcatgcgaccgcgttgcggaaattgccccccaggcccgcctgtcctgcatggaatacggcgtggaaccttccttttaccatcttgacagaagcccgtctccagaaccttcctgcctctttgccggaaccatttacgaactgaagggcatctcctatctggtggaggccttcacgcacccgtctctctcccatgtccagctgttcgtggcgggcaacggagccctcagggaaaggctggaagcccggtccacccccaacatccactggctgggcagcatttcccgcgaagaactccagcagcgcctctccacggcgtggttcctggtgcatcccaccctgggggattgctgccccaatatcgtgaaggaggcaagagtcatgggccttccggtaatcaccacggaagaaggcgggcagactcaatatgtccaggacggcgtatccggctatattgtcccggtccgcaacagcgccgccatcagagaggccgcgcagaaactttcagccagcctggataaagccatgtccatgggaatggagcggcatcaggaatgccgccgcctgctggacgtaaagcagacagtaaccgggtgcctgtcacgttatcataccatgctgtatccacgctgatgaaattattccttatccatctgctttccgggataggccgcctgctgctcaggctcaggggggtgcgcaccggaacaggcatcattctttccggatttcccctcattaaaaaattcccgggagcgtccatcgccatcggcaacggagtcaccatccactccctgacccggatgaatccggtactttcccatcacacctgcctggccgccctttccaatcaggcaagcatcattctggaggacggctgcggcatcagcggggccgccctggtctgcgtcaacggcatccgcatcggacgccacacgctgataggagcggacgcgctgattctggacaacgacatgcactatccccggagcggcgccaggtggggatcaaccctgggacagcccgaacagggacaacccatttccatcggggaaggatgcttcatcggcgccagggccaccatcttgaaaggagtcaccatcggctccggttccgtagtcgccgcaggagccgtcgtcacccgggatgtgcctcccggctgcctggccatcggaaatcccgcagtaaataaaccgctccccgaacgtctcaaacatccccgggaaacacaaaaagccatctgcccttgagcatttcccctgcctgcctcagggggctccaaaggcagactctttcatgacaccgcaaaatcctacaattttattaccctcatcccgggaacattggattgacatatcccgattcctcgcggcatgcctgattgtatgcgtccacgcgccggccttctctttcgccagcctgttccagcttccggttttcaacggccgcgtggcatttttcctgattctggcaggctatttcatgggccggaataattcctggaacaaagcgttcaaacggggttatacgcttctcattccctttctgttctggaatatagtcatctctttcctccatccgggaatcatgaatatgggactgccggaatacttatgcaaccttgcaggcttccgttcccttttcactcccgattttattcctctttctatcaatggattgacgggagaacccttttcccctcccacatggtttttgagggatatcattctctgttccctcatttcccccatcctgctgaaattgaaatatccggtttttgtcctaatcctgatctgcttcagcacggactggctccaataccccgtgccggccaacaaggttacccttgctccatccaccgtctccctgttcagtctgggccttttcctgtcttccatcaaactggctgaagtaaaacacgtttacaaaaattcctttactcccctcgtcctgctcgccgtaggaaccgggtttctgctcagcatcaccaattacttgagcgtttgccagaataacccggaatggaacatgcacaaaatactggcatcctatggagtatggaatatctcctggccggctgtccatttgaattccctctgcccagtcttcggggcgcttcttctcatggcccttggaatctggctggaaaagaaaattcccgttgccagaaagctgtccaactatgctcccgcctgtttcctgatattcgttcttcattatcctttgatcatgctgatcccctcccacatctggaaacaatcctttttcgctccctttgtattaataccggccatcattttccttatcgtcgcattctatcttttcctgagaaaattcttcccggcctgcctgccctacgtcgccaacgaccgcatcacccatgttcccaaaaaaaattaaggcctgtatcctctttcttcttttaaccgttccggccgcattaggcgccgtctggtgcgccaaacacgcctaccgctaccatttggctgtccatccccttccctattccccggaacagggcgccctgctggaaaaacaccggcaggacaaacgcaatgcccggctgaatccccatgcccccgtgttgttcctgggttcctccaccatggaattctggctgaaagaagggaaacattcctgggaaacctggttttcccctctgggatgcctcaacctgggaaccaggagcgagaccacgggcaacctgctctggcgcctcaatgacggcctgacaagcccgctggcgcccagaatcatcgtcctgtattcgggagtcaacaatctgggagtacaaaaaagcctgggatggacggcttttcagggaaacgtggccatcgtcaaaaaaatcagggagatttacagcccggaaacgaccgccatcattgtcattcccccgctcatcgcacaaaaagggtcgcgcatggaaaccttcaggaattgtctgctgcaacacgactttggagaaaatgtccatgtcctccccctccatttcttccttccgggaaaagacgccagcctttatacttgggacggcctccatctcaacgccctgggatatgaagccatttcgcctccgcttttccgcttcctccaacagcttttaagcaggagcagcttttagggcttcacaggaacaacaaactttatccgccattactccacgtgatgattgaatcttctccaccccatcaggcaacacttcccatgaccctgtttctggcaggtcccaccggatcgggcaaatccgcggtagccgtggaactggcggagatgctggacgcagaaatcgtcagttccgacgcttaccaggtgtaccgggagctgcccatcctgacggcggcgccttccccggcagaccgggaacgggtcccccaccacatggtttccatcattccggtccaaaagaactggaatgccacggaacactaccaccgcgccatgcgctgcatggaagaaattcacgcacgcggaaaaatcgccatcgtcacgggcggttccggcctgtacttcaaattcctctcccacggcctgtcggaagcgccgccgggggacgctgctctccgcgccgctttcgcgaactgttccacggaagcgctatacgccaggctctcttccctggacccggaaggagcggcctcgacggatgccgccaaccggcgttatgtggaacgcaatctggaaatcgtccttgccggagggaaaccgctttccttctggaagaggaactggctggccccgccacgcgggcccggctgggtcatcagcagggatgtccctgaactggacggaagaatcgccctccgtaccgcacgcatgatgcaggagggtgcggtggaggaagcggcttccctcggcccatgctccgccacagcggaacgcaccctgggcctggcattgatacgaagcatgctgcgcgggaaaatctcccgtgaaaactgccagatccagctggccctcgccacccggcaatacgccaaacgacagcgtacctggctgaaacgcgaacaatggctccggaaacttccggcttcccctgccgactctccccgggatcttgcagaacgcatcatgaaggaactggaatcttcaccctctttcatacgccgttaaatatccggaaccatcccacagcgggaaaaatgccagacgccattcataacgcacgccgccacgaaccatgggcacaggatacgcatggcagattgagcttacgccgcccgcttaaaagccagagatctgtcgaaagttccgccaaataaccggatcaggatgcctgtcttccacgctttttgtcttggcttacggaaacatctttggtttacaggggcaggcggcaaaacttttctcaaagcggtccgccctatcaccccatattttttccagcatcgtggcacgcatccttgtaggcttatcaggcggagtggacagctccgtggcagcggctctgctcgtggagcagggtcatgacgtagtgggggcctacatgaaaaactgggtgaatgacgaaggcattcccggagaatgcccgtgggaacaggacattcaggacgcgctggccgtcgccaaaacaacaggtattgaattccgggtcatcgacctggtggacgaataccgcgcccgcatcgtgaattatctgattgaaggctaccgcgccggatatacgcccaacccggacgtattgtgcaaccgggaaatgaaattcggcgtctttctggattatgccctggaacaggggttcgattacgtcgccaccggccattacgcccgcaggatggacacgccgcaaggggctttcatcctgcgcgggcgggacccgaacaaggatcaatcctacttcctgtccctgatgcgcccggaccagatagcccgcgccgtctttccccttggggatctgctgaaaccggaagtgcgcgttcttgcggaaaaatacggcctccccacggcacgcaagaaagacagccagggcatctgtttcatcggccaggtaaaaatgagcgatttcctgcgccactacctgccggacaagcccggcaaaatcgtggacacggaaggccggacgctcggcacgcacaacggcctgcatctgttcaccatgggccagaggaaagggcacggcgtcgcctccccgcgggagggagtcgcctatgtggtggtgggaaaggatgtccagcgcaaccgcctgattctgggatacgaagacgcgtccacgcggggattgtacgcgtcccgcgccgtggtcggcggcatttccaatacgctcgctcccctgccggcccgcgtcatggcccagccccgctaccgggccaaggcggaatgggcctcctgcgaatatctggaagaaggaaaggtgcgcctgggctttgacacgcccctccgggccctggccgtgggacaggtctgcgccttttacgacggaggcaagttgctcgggggcggcttttttgaatccatagaaccatgactgacccggaacgcaccatagccgcacaggccaccgccgcaggacagggagccatcgccgtcatccgcatgagcggtcccggctgcatggacatcctgaaacaatgcacccctgcggctttcacggaacgcctccggccgcgcagggcgacgctggtctgcatccgggacgcggaaggagccgccattgaccaggcgcttgtcacctggttccccgccccggccagttatacgggggaagataccgcggaaatctcctgccatggcggcatgctggtgacggaccgcctgctgaaacgcctctaccaatgcggggcctccccagcggaaccgggagaatttacaaaaagggcctttctgaacgggcgcatggacctgacccaggcggaagccgtgatggatgtgatttccgccgggagcgacctggccctgaaagccgcgcagacccagctggacggaggcatcggcgcccaggtggacgaactgaaagacaacctggttcatgtgctggcccacattgaggcctatattgattttccggatgaagacatttccccggacaccgcctccgatcttctggcgcgcctccggagcatggaggaaaaactggccgccctcctcagaactgccgaaggcggacgcctgctgcgggaaggcatccgcacggcgatcgccggaccgcccaatgtgggaaaatccagcctgttgaataccctgctgggatatgaccgggccattgtcagcaatattgccggaaccacgcgggacacggtggaggaatccatccagatggccggactggctctgaggctgattgatacggcaggcatgcgagaatcttccgacgtcattgaacaggctggcattacccgcaccaacagggcgcttgaaaccgcagatctggttctggaagtggcggatgcctccatgccccgggtaaaagaccacaccgcccctgccctcaccgcgccccggctgcttattctgaacaagtgcgacctgagaatccatccggactggaaggacgtgcccggcatccggttttcctgcgccaccggggaaggaagaaaggaattggaggaagccattgtccagaccttcgcctccaccctgcccggcgaaacgggcagttcgctggtagccatcaatgcccggcatcagcatgaacttggcctctgccgggagcatgtccggctggctgcggaatccatttcccgccaggaaagtccggaattctcggccctggaactgagggaggccctgacgaacctgggagaaatcaccggagccgtggatacggaggacgtgctgggcgccattttttcctccttctgcatcggaaagtaggagtacctgagattcgcatagtagtagagaaacataatcttaaattctgtaaagtttctgtgatttcaaaccgaagaaatcaaaatatgggaagagtcagatacagtagttgctaagagttatttatccgacaaagaagtctcagccttgaatcttctatctgctattgcttttgatttgacagaacttcgtacagaacggcagattattactacggtggtaaactggaaaaagcaactggatgatttcctgacctcatatgatatattgaataatgctggtactattttcgctaaacaagcacaagaaaaagcatacgctgaatacagtagatttcgcttgattcaagacaatgagtatctttcggatttttaaaataacctaaaattagaaatataaaaatcgtttgagaatatttaaattcatttgcataatacagttttaattagcgacatagaatgaataataacaatattttccaactcgtactgcaacttttgattgaatcaaaatcaataggcaaacttgcatctatcgtaagaaatgagtatttaaataagatatcgcaagctgcgagttattaaaatgatcattccataacaaattccaaagttacaaacaaaaatataaattaactatagtctaagaactttttttcgaatagaaaatctacaatgagtatctagagatgatgaaacgaataatagataagtgtaaacaaatcataggaaaacagttatttgagaataaaaaagaagatattcagttaccttatattccattatctccaacagatagtgcggaagattgtgatgtttacttagatgctctgtcgtgggctttgtctaataaaaaacagataaagaatatcgcaatatcaggtccttatggttctggtaaaagtagtattctccaaacgttcataaagcgagaagaacataagaaatggtcatttcataagaatcatttccttaatatctcattggcaactttcgaggtaccaaagaaaagtaatggccaagaaaatagcaatcaccatacttgcgataatgacactcagcgactaatagaattaagtctactacagcaactattttatcgtgaaacaaattctaaaatccctgattcaagattaaagaagatacaaagtctaaagtcatggaaattatttttacaaacaatagtttccatgatttttattttttctctcattgtccttatcctaccgaatgagatggattatttttttaatttggaagaatctatctttgcaagcaatattgccaaatatattgcactgactgttagtttagtaatattgtttgtttttttctataaatcttcacgttcgataataggtctttctattaaaaaattgaatctaaaaggaactgagatagaaatagataaaaatatcagtaagtctattctaaataactacattgatgagattatttatttctttgaagcaacaaactacaatgtcattatcatcgaggacttagaccgttttggaaattcagaagtattcacaaagcttcgtgagattaatctccttatcaacaattcaaagaaagtcaaacaagatattgtcttcatatacgctataaaagacgatatgttcctggataaggatagagccaaattttttgattatatgcttcctgtcattcctattgtcaacttttcaaactcaggagataagctgaaaaagatgctggaaggagaatctatcaaaatagataatgatttgatagatgacttgtcactgtttgtggacgatatgcgacttctgtacaatataatgaacgagtttcatatatatgctacaaaagtcaatcagcagcttgatatgaacaagttgcttgctatcattgtatataagaatctatttccaaaagacttcactgatttgagtgagaacaaaggagaactctttgaaacaatcaacagcaagaacaaatatatcgaaaatgcaattaatcaaattaacaaacaaattgaatcaataaaagagagattacgactatctgatgaatcttttgtttctgatataaaagatttacgcactctttatgtatctaaaatctgtgaaaaaattcttgagaaagccccacccctagtaggattaaaagataacgatgaaaaggtaagtatagaacactttactgatgataacacattttgtaaaataaaaggtggtaatcttgattactattatttcgatcatcattataatggacgatattctaattcttattcattcgaattcaatgaaatagaaaaacaagttaattccaattatacttacgaccaacgagaaaaaataatcgctgataaacaggcaaataagaataataatctcagaatagctattacaaacctacaaaaacaaataggacgaatcagaaagagtagcttaagagaaatactatcagaaggcaaaataaaaataaattgtactgatgataaaaagaaggagttgattgatattctattgcgaaatggttatatcaatgagaattatttagactacatttcagtttttcatgaaggtgctctttcaaaaacagattatcaattcttgataaatgtaaagagagaattgtcacctcagttcgactataccctgaataaaaaagaagaactgctcaagcgcataaatttatatacatttgagaaagaatgtatcttgaactttgatcttgttgatgcgctgattataagtcaatatacagataaaacagatacattattcagacaacttgcaaatgagcacgagataactatcaaattcataaatgaatatattgataaaagcaaacacaaaagcatgtttgtcaatcaattatgttcatattggaataatatctggagatatatacgacaggagcctagttacaccgatgggagaaaagagcagtatttcttattgattttgaaatatgcaaccattaatgacctttacaatatttttgacgaaaacgatacttatataaaaaactatcgtgatttctttattatacatgtagataataagaaaaaacaaaaattggtagaaaagttgggtattgtgttcaaaactattagtccagattctccagcacaagacttaacatttttgatgcagaatagttattatgagattaacatagagatgctcaaaattattattccaaaagataaatttgagcaagaaaatttcaatagtaaaaactactcctatcttaaaaactctggtttgaatgatattgtggaatatatcgaggaagaaattaatacctatgtagaaaaaatattacttgaattgagaggtaataccagagaggaactagaagaatacactattctgctaaacaattccaaattaaacattaagcttaaggataaactcattcaacagatagaaactatcgtggatgatatatccactattactggcttggatgaagctcatttattattccagtattcaaaagtaagaccaacctgggggaatgttcaaacgatgtttgcgaatgatgaagattcattatcaccatctgttattacctttttaaatcaagggaataatgctatcgcactggcaaggaacaaaatgacaaccgacaaagatgaagacggagtagaaatatatagcaaattatgcaaagcgttaatgcacgaaaatagtattaatgataggtcatacaaactgctcgtatcatctattccatggtgctacaatagttttgattcaaattctatatcttatgaaagaatgaaagtcttaatcgagaataataaagttaataaagttgttgctggttatgattttttacgtcaaaattacaaaggtctgaatattcagctaatcgaaaaagctcctgacaaattcatagagatattggatcaattagaagttgatacttcggatatggagaaaattatcacttcatctcaacttaacgttgaaacgaaattctgtttcgtaaatgcagtggatgaagatgttattataaaaagcacctataattcaaaatttgtattagagaatgtactgaaaaattcaaataaatattctatatgcgaatctttacaaattcagttaatcaatagaataggacttcctgttactgatagaataaatctattcttacaaatacatgatggtattgataacgatacaataaaaacattcttaatatcgttaggcaatccttatgatgaaatagccaatcctaagaaatcacctaagataaaaagaaatgcattaaatagtgtattcatgaatatccttattcagaaaggtattatcacatcctattcggagaaaacaaaccaagtatatcattcaaaaagagatatagaacaataaaatagatgactgatttataatcattaagatacaatgtgtgctaaaaacgtaaagtttcaagaatttagcgcatgtgcatataaatacacaagtgataaaacatctacacttttccaagcgaatcaaacatctcaaatattcagagcataaaaatctcaccgaaaaccacaaaaaaaatactaagaaaacaactatctttgtattcaacaagcgttctgtaacatccatgcgaaaatgccctaccatccaatacgttgtatctgatagcggacattttccacaaaaggattgaaagaaggcggtacaacacgtatatgcaaaacaattaaatacaacgatttgtatttatccctacattctgtgtacttgtaaaaacaaaggttgtaccgattaaaatgaattgtcactaataatcagtgatgtaaatatgctacatcgggaaataagaagaagcttccatcaacaggtttttctgattccggaatcttcttttctctccattctgtggaaggatggcaatcatccaaaaatttatttgcggatattttcattgattccggcttgttaattcgctatcgatatcatgtttttatgttgcgcaccctttctctctttttccttttcgctctggttcctgtccaagccgccatttattttgcccataatgtttccgaagattcggggttcataaataccaaaaaatactggaacggagattccgatttatgctgggcggccacagccagcaatatgctgcaatggtggcagaataattcctccggcattccggctttcgttcccaacggccagaatgaaagcggaagaacggaaatttacgatgtgttttgcaataattgggccaatacagggaaaggcatagaaataggcctgcggtggtatctgggagggaaacccctcaatcccaacaactatttatacgattttaaggaaaccatcactgaaccgcagaatactggccgatactgggagggatatatcacatctctgggattgtcctcttccacctgggaaggcgactgccctttcatcagcagcaaatacttcacgcaaagcgattttcccctccagttcggtacagacctcgtctcatttttccagaatggcggcgtagtgggcctttccattgctcctgcatcaggtccgggtcatgccattacctgctggggaattgaggttgacgacactaccggcatggccaaatccctgtacgtcacagactccgacaacggacaaggtctggaaaaacgggacgtttattatcatgaaacggatggaaccctgcacttggggagcgagaacggccctcgtatcaacgcatacgacgccctgatgctgcccttttataatgttccggaaccttccacggcagttctcaccaccctcgcggcgggaactgccttttgccgccgcaggcgccgacgctcttaaggcttcacgaaaacattccctcctgtcaagtttccggctcttcaggaggcgaatcggtatccgaggtgaataacggaatgtaggaaggcagattccagttccagcggatggccgccaggcgtacggaaagcgtgaccatgaagcccgtcacaaagcaggaggaagaatcaattccggcatagtaaagcaccgcgtacgccacgcctcccagcagggccgcggtggcgtatagttctccgggacggaacacgtagggaacgttgccggtaagcacgtcgcgcagcaggccgcccgccacgccggtacaaatgcccatcatcacggaaacagtgggcgtatagccgtggagataggatttttccgtgccgatcatgccgaaaagggccagaacgatagcatccgccacgcggatagtgcccatgggaggcggatatttctgggccacataaaaggttgccaggctggtgacgacggaggccaggacaaaaatttccccggaggggagcgtccagtacaccggtatgtccagcaggatgtcacgcacggttccgccgcccaacgcagccagggtgccgcagacaatcacgccgaacaaatccattttcacccgcgaggaagcgatggaacccgccagggctccaataatcgtgctcatgatttcacaggtggagaggaacatggcgggaggaacaggaaaaaaggcatattcagcagacccgtatccacggcaggcaggagtcctggctggcgcagaacagggaggtggaagccagccccatgtcatgcagggtatcacgcatcaggctttctgccaatgccggagaattgctttctgcgctcaggtgggccagcaccacgtttttcagggcgccatgagcaatccgcctcagcaggtcgcacgcctgctcattggacagatgaccgtgcgcagaggcgatgcgctgcttcagcggccagggtctcctgggagtggccgccagcatgtccggatcatagtttgattccaccaccaggctgtccaccatggcaaggtattccgctatgcagccgggagcctgccccgtatcggaaatgaaacccaggctggaccgctccgtttcaaatttgaatcccaccgggtccacggcgtcatggtaagtggggaagggagtaatgacgatatcccctattctgaaagactgccccttttcaaaataggcccagggagcctccggcgctttttcctggacgcacatggccgtatggcgtgtggcgtaaacacgcacggcatgctttctggtgaactggtgcacgcctttcatgtggtccgcgtgttcgtgggtaagcagaatggcgtccagctcatccggctccactccggcggacttcatcttatcccgcagcctggcggcgctgaacccggcatccaccagcaggacggtttcccccgccctgacaatggtggcatttcccccgctgccgctgcccaacacgcaaaactgcatcatgcgcggaatataataccgcccccggaagggagcaagaccgtatccatgctttttttcacggcatgagcatataaaaaatacttttttccagtacggggttgacatttcaggtgcattaaagtgtattgaagtcactacgtagtgtacttgcatgcgatgagcagtgtatcagacaacctttttggtgcatacacgcacaagctggaccccaaaaaccggattgccattccggccgaatggaggccctccgaaggttgcgccctgctcctgttatccggccggcgccttgatttgccgaccgtcaaagcctatacgcgggaaaaattccagcaactcattgacaagatagaaacaacgcccggctacacggaagcgcaaatcgacctgttcatcggcaaattatacgccaactgtgtggaggctgtcatcaacgcccaaggcaagctgctgatacccaaacaaatgtgcgaacacgcacagctcagttcctccgttcggctcgccgcacggagaggatatttcgaattgtgggaaccctctctctatgaagaagtttcccggcgtgaaaacgccagcatctccgacatcaaccaatcctacggcattctctagctttccttcatgcccccagactcctccattccgcccaatccccaggcacgcccctgcgcaacgcttgcattgcgcccgggctggctggcttccggcctgggcgtcggcgccagaaccgggctgcatgcggaactcacggcttattccatcgttttctgggggcacgatgcccttccggcgcaggagatggttgcctggcagcaggaaaaggcacgcctcatggcagagatgtccctagccgggcaaaagggcgcctatggcaagctgggcgcattgtcttccggcctgaaccgggcttttgacgaccatattgagctttctttacgcgcgggcgcgggtacgcacgtccgcacggaggaggcgctggccctggcaaacgggctcgcggaagaaacgtcctgccgcgtgctggcgtggagcgtctgccgcaaccatgtgcatgtgattgcggagctgacggaggaaaaaggagtggatgaactggtctgctcctggaaggcgctggccccctccatgaactgggaagacgcgtaccacacggaagccctgaaagcccgggaagccgcggctagggtggacgccctgatttccgaactgggggatgacgccgctgccgccgttgatgcggaagcggacggggcagactccagaaacggcttccggcacattaccgtgctgctgcatgagacggtggacatgctgaaggcaggtcccggcaaattcctcgtggactgcacgcttggcggcggcggccatacggaacttctgctggagcagggagccactgtctggggcattgaccgcgatgcggacgcccgccgcgccgccatgctcaggctggcgcgcttcggttcccgtttcaaagtcctcgccggcaacttccaggacgtggaaagcattctttcccagcagggggtttcccgggtggacgggctgctggcggacctgggcgtttcctcccaccagcttgacaccgcctcccgcggcttttcctttagggaagacggccctctggacatgcggatggatacccgagccgctctctccgcccggaacctggtgaatgaagccccggaagaagaaatcgcaaatatcctctggcaattcggcgaggaacgcgcttcccgcgccattgcccgcgccatggtgaaagcccgtgcccaggcacccatcaccactaccgcacagcttgcccgcatcgtggaatccgtcctgccgcgcaaaggaaggcagcaccccggcacccgcacgttccaggccctgagaatagcggtcaacggcgagctggatgccctggacgctctgctggattcctccgttcgtctgctcgggcagggggggcgcatggccgtcatcaccttccacagcctggaagaccgcagggtcaagcagtttttcgacctccggagccgtccggaaatagaccgcccggaatggccggcaccccgccccaacccggattactgcttccgcccgctttcccgcaaacccgtcactgcgggagaagaagaactttcaatcaacccccgttcccgcagcgccaagttgcgcggcgtggaaaaaatcatctgaccatctctcttccgccaccgccatgaaaagattcaaacagcgtttcaccggccaccagatcagcgtgagcatgatcatgtggcttattgccttcgccgccctcacctgcggagcgggcatcacttatgccgtgctgaaaaacgaccagatacaggtcgcgcgcgacatcaagcaaatgaacgaagagatcgcctcctgcgaacttacaaaggaatattaccgttccaagacttcctccctgaccagccgctgggccatccgcgacaggctggcccaggacaagtccaacctgcagcctatcgagccttcagccgtagaatacatttcttccgaaaacgcctcccgcatcgctgcggcaggccattaactgcgttgagccgttcatgatcacgatcacgaagtccagatttgccagaagaagcctcgtcctgtgcggcctggcgggcgcggcggtcatctggctgatgttgtcgctggtcaatcttcagctggtttccccccgaaaaacgagcggcgtttccagcggcggcattattgaacgggaggttcttttgccccagcgcggccgcatcatggatgccaatgaggaaatcctcaccagcaacatgcagagttccgagttgattgcggacggctatcatctgaacgaccccaagaccatcagctgggctctggcctattccaaggccgtccattccccgttctgggagaaagctgcaacggataaggaaaaggaaaagctcgtttccggcttccgtagcaagattctgggccaggccgccagcaaaaaggacggcagcaaggaacataatctggcgaaaatcctgctggaagagcctgaagacggaccggaaggggtagatatggccagaaaaaagctggaagagctttatgagccggagatggtgaaagaatacgtgcaggcgcacctggaatacgccgccaaagtgattgcccctttcctgccggacatgagcgtgcaggacatcatcaacacggtggaaaaagacggggcgattcccaagaagcgcatcgtcattgccaaaaacctgtccgaggaaaaagcggaactgctgcggcaggctatccagaacgcccgtgtccaggggttccgttttgagacctcctccaaacgcgtctattccgtgccggaatgcatggtgcatattctgggctacattgcccagacgaaggacagcggcccccggcccatagccctttccggccttgaaaagcagctggatgaccagctgctgggccacaacggcatcagggaataccggaaagacagccgcgggcgcatcattccctccgcggattcccgcttcaaggatgccgtggacgggctgaacgtgcgcctgacggtaaacatggaataccagacgatcgtggaggaggagctggacgccgccatctctttttacacggaccagacccacaaaccccgcggctgcattattgtggtggaacccaagaccggcagcattctggcgatggccagccggccccactataatttaaatacgcgcgagggccttcaggaaggcgcctaccatttcgccgtgcagtccctgtacgaacccggttccacctttaaaatagtttccgtcacatccgccgtggacagcggaaaggccacgttcgacaccatgatcaactgcaccccctatccggtgcccggttcccgccccgtcacggacgccccccgttcctatggcggcctgaccgtagcgggcgtgctgaaaaaatccagcaacccgggcgccttccgcattgcactgaaatcgggttggcccacgtataaaaaatactttgacctgtacggattttcctccaaaacgggtatcgacctgccgggggaaaccaacagccagtgccaggacggcagcaattttgtcaacttttcccgcatcagcttcggctactccctgatggtgtcccccctgcaggtcgccatggcttatgccgccatagccaatgacggcgtgcgcatgcgcccccggctggttgacggcatttatgtggatgacagaaacttccagccttccccccccgtggaggtatgccgggtcatgagcgtcaagacggcccgggaccttcggaacgccctgttccacgttacggatctggacgggaccgccaaaagagcgcgggttgaaggctataacgtgggaggcaaaaccggaaccgcccacaaggtgaagcctacaggcggctattttgaaaaccgctacaccgtctcctttgtaggaatgctcccggtggaggacccggccttcgtctgccttgtcgtcattgacgaccccacttccaagcattgccatcccggaggcggaaccgtatgcgccccggtcttccagaaactggccacccgcctggcggccgccatgaacattcctaagaacgtcccttccgcagaggcaaataaaaaagcctcccgtgcccaggcctcttccaccccatccaaaccgccgctcagataatcccgtcatgaagctacttaccttactcaaagaccttccctcccatacgctcaccggctccccccaggtgaaaatctcccatctggaatgcgacagccggcgcattctgcccggttcctgctacattgccctgaagggaacccgggcggacggccatgaattcatcccggaggccattcgccgcggagcctgcgccgtcgtcgcggaaatgccctgcacgcaggaagccaaggaagccggagtcagctgggtggaggtgaacgactcccgcctggccgtcagcctgatgggcgcggcctggaacggacgcccttcccgccacatgaccatgatcggcgtgacggggacgaacggaaaaactacgacggcctacatcgcccattccctgctcaagcagtcctggctgcgcgctggattgatcggcaccatcgcctatgacaacggggaggaaatcactccttccacccataccacgcccggaccgctggaactggaacacctgctgaaggaaatgtatgaaaacggctgccgcggcgtctccatggaggtctcttcccacgcgctggaccaggaacgcgtggccggcatcaatttcaacgtgggcattttcaccaatctgacccaggaccacctggactaccaccacaccatggagaattatttccaggccaaggcgaaattgttcgaacagatggcacaggacaccaaatcccggcgaaaacccgtggccgtcatcaacatcgacgacgcttacggtcgccggctggcggaaatgttttccggccgcatgaccgtaaagacctacgggtccgccctgggggcggatttccgcatgctggtgcaccacgccaccgccaaaggcagcgagtacgaattggaatacaaggggaaaagctacctggtccgtgtccccctgatcggcaagttcaacatgtacaacagcctggccgcgctggccgccgtcatttgcgccggcatccccgtgcgggacgccattgcgaaccttcagaatattccgcaggtccccggcaggctggaactgttcacccaccccggaggcgcccagattttcattgactacgcccacacgccggacgccctggaaaacgtctgcaagacgctcaaggaactgtgctcccgccgcctgattaccgtgttcggctgcggcggagaccgggacaggggaaaacgccccctgatgggagccgctgccgcgcgcctgtcagacgcctgcatcgtcacctccgacaatcccagaagcgaggaacccctctccatcatcagccagattgcggcgggcatgccggaaggcagatacgccatcatcccggaccgggccagagccattgccacggctatcgagcaggcccgtctgggggacatcgtcctcattgcgggcaagggccatgaaaattaccaggaactttccaccggccgcattgatttcagcgacgccaaggaagtgcgccgcaacatgttcatcaaggaacgggaagaattcccccaggcataacacgttattccatctttctttcatgatttccctcacggcgcacggcatctgcaacatcatcggcggaaaactggtcagtggcccctttgacagggtcgcttccggcggcgtgtgcacggacagccgccatttgccgccccatgccgttttcttcgcgctggggggagaaaaatttgacggcaacctgtttgccccggaggcatcccgtaccgcggccgccgccgtcgtcagccgtgtggaggaaggcatggccccctcatgcgccgtcattctggtggaagacacgctggaagcccttcagaggctggccgcctggtggcgttcagagcttaccctcaccgtcatcggcctgaccggctccaacggaaaaacctctaccaaggatctgacggcctccgttctttcacaggggctccgcaccatcgccacgcagggcaacctgaacaaccacatcggcgtccccctcagcatcctccgggccgccccgtccgacgaagccgccgtatgggaaatgggcatgaaccactccggggaactggctcccctgtgtgaaatgacgcgcccgaaaatcggcatcatcaccagcatcggcacctcccatatggaatacctgggctcccgggaaaacatcgcccgggaaaaatgcacgttggcacactgcctgccggaagacggcttcatgatttttccggcggactgcgattatgcggatatgatccgtcaatccacccgcgccgcctgtattgactgcggcattggcgccggaaccgttcgcgcggaaaatcccgtctctaccgagaacggaacacgcttcatcctttccatcccggatttctgccgggaagaggtggaattgcccgtccacggccggcacatggtaaccaacgcgcttctggccgccgccgccggctgggtggcaggtcttgcgaaagagcaaatcgcctccggtctcacccaggcgcggcttacgggcggaaggcttcactgctcccggatcaacggcattctggtagtggatgacacctacaacgccaacccggattccatgcaggccgccctgcgcaccttagcagagctttcctgcgccggcagacgctttgcggtgctgggcagaatgggggaactgggcgtgttttccgaggaagggcatgttctggtgggccgcacggcggaagaactccgtcttgactgcgtcgtcagcgtgggaacggacgccgcccggattacggacgctatttctcccaattcattcactcaacgcctgaacttcagctccgcggaagaagcggccgaatggctccgtagccatacggcgccgggagacatcgtccttttcaaaggcagccgtcttgcccggatggagcaagtcatgaaccttacctttccgccacagtaaattgtatgcattccctcattgaacagttcagcccctcaggggcatttgcaggaccggcagggagagccctcctggcctgcctggtttcctttgccctgacgatgatcttcgccccgcgggtcatccgggagctgatttccctgaaaatcggccagcccatcaggacggcggaggaagtgcacaagctggcggaactccacggagccaaggcgggaacgcccaccatgggcggcgtgctgatcgtgggttccatgacggcggctaccctgttgtgcgccagaatgggcaatccctttatcatttcctgcctgatcgtcaccctggcgctgggcctgctgggattccgggacgattacctgaaggtggcgaaaaaaacctcggacggcatttccgcacgtaaaaaactcctcgtccagttcctggccggcctggccggcgtcaccttcctgtacctgtacccggaaggcagtccccgcgtggaacttcacgactacatatcctccctgttcattccgttctatggccaggtgaacctgccatggttcgtttacattcctttcggcgtcgtggtggtcatgtccgcctccaatgcggtgaacctgacggacggcctggacggccttgcctccggctgctctgtcgccacgggcatcacttacgccatcattgccgtcctctgcggaagctggctgacggctgattccctggatattcccttccaccccggcgcgggagaaatcagcgtcttcatgatggccctggttggggcctgcctgggcttcctgtggcacaactgctacccggcgaaggtatttatgggagacaccggttccctggccctgggcggcgcgttcggcatggctgccgtctgcacggcgcaggagcttctctttatcgtcatcgggggcgtcttcgtcatggaagccgtgtccgtcgtcctgcaggtgggcagctacaagctgcgccacggcaaacgcatcttcgccatggcccccatccaccaccatttcgaactcaaaggctggaaggaaacgcaggtgattgcccgcttctggatgatcagcctcctgctggctttcctgggccttttcctgataaccaccgcctgacaaaccacgaacatgcagctcaataaccttaacatcgccgttctgggagcgggaagaagcggacgcgccgcggcgcgcctcgccatgaagcatggcgcacgggtatgcgtgtttgacgcttccgcctccattggcggatggccggaagacattcccctgcataccgccgccacggaggaagacgggcgcgccttccacgcggatctggtggtcatctcccccggcattgagacggacagcccctttgtcaaatcctttggacgggaaggcgtggaaaccatcggtgaaatggagctggcatgccgcttttaccatggccgcatcatcgccatcaccggaaccaacggcaaaaccaccaccacatccctggtggaaaagattttgctgcgcgccggaaagaccgccgttgcctgcggcaattacggcgtgccgatggcggaaatcctgctccgggattccgtgccggacgtgatggcgctggaggtcagctccttccagctggaaactatccgcgactttcatccggacgtggccgtatggctcaattttgcgccggaccacatggaccgctacaaatctgtggaggattaccaccgcgccaaactccatatcttcgacaaccagacgcaacaagacctggccgtcgttcgctccggagaacagcttccacagttgaaagcctccgtgctcaccttcagtccggaagatccggcagctgacctttattaccgcgaaccgttgatcatggagggcggcgcccccctgctgaacctggaagggaccgccctgaaccagcgccataatgcggaaaacgccatggccgccgtcctggcatgccgccacctgggcattcccgcagaaacagccgcagatgtattgaaggagttcacgccccccggccaccgctgcgaaaccgtccgtacactggacggcgtgctgtggctgaacgattccaaagccacgaatctgcatgcgctggaagcggctctgaaatcacagcattcccccgtcatcctgattgccggaggcaaggacaagggactggattacgtgcccctgcagcccatgctgaaagaaaaagtgcgcgcctgcgtggtattcggccaaattgcggaccagctccagcatgctttttcccccgcagtccccacggaaaaagccgcagatgtagaggcctgcgtggcaaaggcccgctctctcgcccggccgggagacaccgtcctattctcccccggcacttcttcttttgacatgttcaccgggtatgtccagcgcggccaggccttccgggacgcggtgaacgccctctcccctctttcctgacaattcaccagaaaacgaccatcatgaaaacgaccaagacacctgatcacaatccgaccggacgcacccgtccgaaacgcaaaatgggcaccgtactccgggccaaactcagcaaataccgcgcccgcgtctccgaatttgaagatgacgcgcccagcagcactgtcgtgcgctggctcgtcgtccttctccttcttcaccttctcgtcatcggcggcgtttacgtccgcagcacctggttcagaaacacgacggaaaccgtagaaatggcggccgccctgcccgcgccgcccaccgtcccgcagcgccccgctcccgcagcgcctccggcagccctgccccaggttccccaggcccaacccgcggccccggtcaccatcacgcagccggaacaggtagtggacgcgcgccccaacaggcagccggcccccgtggcggaggaacacattccggatgcggctccggtggcaggtcctgcgcgccacatcgtgcgcacgggggatacctgggaacgcgtcgcgcgtgacaaccaggtggccgtcaatgatctgaaagccgtcaatcccaaagttcagcgccttgtcagcggaagcacgctcgtcatcccggcccggcccggagacaaattcgaaccggaaaaatccgccgcggaggaaatggagccggaaggcgtgccccacatcgtgaagaaaggggaaaccctctccgtaatcgcccgcaaatacaaaatgaactggcgcgccctccagaaattcaacaagatgaatgaccgggacgtagcgcgtctcaaaatcgggcaaaaaatcatgatccccaaaaagtaggcatcttcctgcccttccgccgccatgtcttccaaagtctgcatgattctggtctggttcttcgtcatctgccttctggtcgtaggcctggtgatggtatccagcacggcggcgtgggcggaggaaaccaagcacccgtacgaacccctgttcaagcagaccgcctttgcctgcgccggtctggtgggggccatgattctctcccggatagactaccggatatggaggaagtatatctggtggatccttgggggggcctgttttctgctggtgctgtgctatgtgcccggcatcggaaaggaaatcaacggggaacgccgctggatcaccatcggcatgcagttccagcccagcgaatgcgccaagctctgcatgatgatggccttggccaactggctggccctgtaccgggaccgcaccacctctttctggtggggttttgtgatgcccggccttatcttcggcattcctcttgccctgattctttttgaaaaggacatgggcacctccgtagccctggccctggccgcgttctgcgtcatgtttgtggccggaacgcgcaaaatctacctgggcggggctttcgccctggccggaacggccctgtacgttctggtgcagagcaacgccaaccgcctggaacgtttcttggcctggaaagacctggacgcccaccgcctgggcgccggcctccagcaataccgtgcttccatcgccctgtcccgaggggggctggacggggtgggcctgggaaacagcgcggaaaaacacggcacgcttccctttgcccacacggactttattttcgcgccgttgggagaggaattcggtttttacgggaccatgttcgtcctgctctgctatttcctgatgacgtatgctggcatcggcgtggccatgcagtgccgggacacctacggacggtttctggccgtggggattgtcgccatcattttctgtcccgccatcctgaacatcgccgtggtaaccaacgccgtgcccaattccggcctgccgctgcccttcatcagcttcgggggcaccaacctggtctttacgctggccgccctgggcatgctcaccagcatccagaggttttccaccggcgcccagcccaattgtgaaatcacccgcaaagacgaacgctccattgacgtaagattatgactgaaccctctctcaaacatccctccctgaacatcgtgatcgcctgcggcggcacgggggggcacctttttcccggcatagccgtagcccaggaacttaaaaaacgcggccaccgcgtcacgctcctcatctcccagaagaaagtggacgcccaggccagcaaaaattacggggatcttgacttccgcaccattgaggccatcgcgatgcccaaaatcccatccctgtccctgctggggttcggcgtcaggctgtacaaagccatccgtttcagccgcaatcttctggacgaagtggaagcggacgtcgtcatcggcatgggaggattcacctcattccctcccgtttacgccgcccaccgcaagggaatccgcacctacgtgcacgattccaacgcgctgcccggaaaggccaaccgcatgaccgccaaatgctgcacgaacgtgctgctgggcattgaggaagccaggcactacttcaatcccgccaaatgcattgtcaccggcactccggtacgccaggaaatggtggcccggaaagacaaaaacgaagccagggcggagctcaacctgccccgggaccgccgcgtggccctggtaatgggcggttcccagggggccaggaatctgaattccctggtcattgaagccgcccggcaatgcgcagacctgtgcgactttctcatcatcaccggctccggggactttgcgcgcgtcagccagctgacggcggacatgccccatgtacacgtcattgaattctgttccgccatggctgccgcgtacgccgcagcggatgtggtcatttcccgttccggggcgtccagccttacggaactggcccatatggggaaggccgccctgctggttccctaccccttcgccgcagacgatcatcaggcacacaacgcacgcgttttcgcggcccacggcgcggcgcgcatgatgcgtgaaaacaccctcacgccggacgatattgcggctttcctgaatgaagtactcaaggattcctccctgctggcctccatgaatgaatgtgctttacgtctggacatgcctgatgcagtatcccgcatcgccaatgtcattgaacatacggaccatgcagcctcccatgattgaaaccttacgcaaaagactgacagacagggaacacccggcacgcctccatctcatcggggtagccgggtcaggcatgtccggcctggcgctcatgctgatggaaatggggcaccgggtgagcggctgcgaccgggtgaccagcgcggagaccgaacgacttcaaagcctgggtctgtctttctcctgcccgcattccgcagacgccgtttccgatgcggaaattgtcatttattccagcgccatccgggcggacaatccggccctggcggcagcgcgcaagctgaatattccctgcatgcgccgcgcggaatgcctggcggccatcctgaacgggaagaaagggatcgtggtctccggtacgcatggaaaaaccactacttcagccctctgcgcgcacctgatgagggaaggccgcatgcgtccgtgccactacgtgggggcggaaatccccgtgctgggaaccaacgcccactggaatgaagacagcgaatacctggtggcggaaggggacgaaagcgacggcacgctggtaaattacattccggagcacagcatcgtcctcaacattgaaccggaacacctggaccactacaaggatctggatgaaatcaaggccgtgttcgaccggctttgctcccagacgcgcggcaagattatttattgccgcgcgcatcccggcgctgaggatgtctgcgccaagtaccccaattccgtttcctacggctggtccgatgcggactacaccgctacggacgtgctggaacgccgcggacgcaccctgttcaccgtgttgaaggggaaagaggaactgggccgcgtggagctgggcatacccggacgccacaatgtcctgaattccctggccgcgattgctctggcaacggaactgggcgtggatttcccggcggtgacgcggggcctggcctcctttgcgggagccaaacggcgctttgaaaccaaatacctttccccctccatccggattgtggacgactacggccaccacccaacggaaatagccgccacgctccaaactgcccgttccctccagccgaaccgcctggtagtttacttccagccgcaccgttacacgcgcacgcagcttctggcggatgacttcggcaaggtgctccaggaggcggacctcgtttttgtagcggatgtgtatcccgccagcgaactgcccattgaaggggtaagcgggcagacgatcatcaacgccatgcacaggcacggccctgtggaaacccgttaccttcccgacctgggcatagcccaccacaccatcggcaacgcgctgaaacccggagacctgttcctgacgctgggagccgggaacgtccatgaatgcggcatgcgcatcgcgcgcgacctggctctgctggaggatctggaacgcactgcgggcggttctctggaaggcaagctgtacgaacccatgtcacgccatacgaccatgggagtaggcggctgcgcccagtactggctggagccttccaccttttccggaatgcaggcggccgtcaactattgccgggacaggaatatccccgtacacgtcattggccgcggttccaacatcattgtcagggacggcggactgcgcggcgccgtcatccacccctccggaggagaattcgatgtgctggaaatccagggcaaccacctcactgccggagcgggcgtgcggttgaaaaagctggtttccaccgccgtccagaacggccttggcggcctggaatggatggacggcattcccggcaatgtgggaggaagcctccgcatgaacgccggagccatgggcatggatatggtcaaaaacctcgtttccgtcacctgtctggatgaagacggggaaatccgcagccatacaagggaagaattgaacgcccagtaccgttccattccggacctggtccacaattttgtgcttcaggccgtgtttgaggcgcagcccgcccctgcggaagaaatggagcgtcttctggaggcggcacgggccaggcggaagctttcccagcccgtcggagccagcgccggctgcatcttcaaaaacccgccggaaatcccggcaggcaagctcattgatgaactggggctgaaaggcgcctgcgtgggagacgcctgcgtatcagacgtgcacgccaattttatcatcaaccggggtcatgccagagcgagggacatcaccatcctgatcgacatgatccgcaaagaggccatggaaaaccgcggcatcgacctgaaatcggaagcccaggtcatcggagaccgggacccccagttttaacccattcactatctatttccatatgaacactctcaagcgcgacctcaaaatcgccctcctgctcggaggtcccggagcggaacgggaagtatcccttgtttccggcaactccgtttacgatgccctgtgccgggccggattcaccgatgtaacgaaggtggacgtgcacggcccggatttccggctgccggaaggcacggagctggcctacaacattatccacggcacgttcggcgaggacggaaccctccaggccattctggaagaacgcggcgttccgtatacaggggccggctcccgttccagcgccctgtgctttgacaaatccgaatccaagaaagtatttctggatgcgggggttcccacgccgcaagcggaaatcctggactgttccaacggcatcgtgatgccgtccctccccctgcccttcgtcatcaagcccccctgcgagggctccagcgtgggcgtccacatcgtccgcaggcaggaggatgtgctccctgccatgaaggaagccgtaacccacggaaccaccgtattggtggaagagttcattcaaggcaaggaactgacggtcggcattctggacgggaaagcccttcccgtcattcatatctgcccccgctccggcttctacgacctgagcaacaaatacccgtggatgaatatgggcggcggcacggattatatctgcccggcggatcttccggaggaaaccgccgccaaggtgcaggaggcggccctgaaagcctacaaggccgccggcgtggaagtgtacggccgcgtggacgtactgctgcgcgaggaagacggcgcccccttcgtgctggaaatcaacaccattcccggcatgaccccttccagcctgctacccaaggcggcggcggcctccggatggccctacgaagacctttgcgaaaaaatagcggaattatcgctagccacccctcgtaaataacgtaatatctgacagagggcggggagtcgcccctcccgcaccccccgatgtcgcacaaagccacaacgccagtcccccgttccgccaaaaggccggaaatgcttcttctggaacgggaggccagaaaagagaccatcgaacgcaagggcaaaaactaccgtttttggctcttccggcgcaagctgtaccacattgtcaccgtttacgcgcttattttcggcttaatcggggctatcgtttttctctggaaagattacatcctcaaatacgactggctttccatcgacaccgtcaccctgaaaagcaacggcattttcaactccgagcaggccttttccgttatgggcatagggccgcaggacaacattttttccatagacgccgcggagctggagcagcgcctgaaaaaatgtcccgccatccgccgggcttccgtcaaacgtcagatatcctccaaccccacgctgctggtggacatcgacgcgcgcatccccgtggcctggattgactgcccggaactgggaattcacccgggagatgccacatacggcgctttggcagacaaggaaggcgttatcttcccctgcatggagcaggtccacatgccttatatccgggaaaagcgcatgccctccgtcacgctcaggccgcccagttccggcaaactcagctacggcgtcagcatccgggaactggaagcgcccatgaaactgattgaactgctttccggcacggtaacggaataccttcccagcatcgtctccataacgacgcccaacgactggtctttctgtgtgcgttttaccaatgactgccaggctactttcagccattacggcctggaacaccaggtggaaaaattgtcccgcgccctccggcacgcacgccagacacaccgcaaaatcagttccatcaacctgattccggagcacaacattcccgtcatctttgatgattcctacgaagatattcctcttgcggagccgattgaagaataacgcccccagacgttctccggaaaaaccgtgttcttctccggctccaaacttcttttccggccccgttccccctgtttcccctaatttcccgccgaacggaacacccggttttcacaagattcttcccatgtcagaattctgttctttctcaatgaggaatgaatctgcgaagacccacagaacacttgccaataaggctgtcccggttatactgcgctacgatatatgagcaacgaaacacctttatcccccgaagcggaaaaactggcggcagcccgcaagcgcaaccttgacctggccctctcccaaatccagaaagacttcggagaaaacgccattatgcgccttggagacaacgtcaaaatggaagtggacgtcattcccacgggcaaccttctgattgaccgcgctctgggtgtgggcggctttgcccgcggccgcattgtggaaatctacggaccggaatcctccggtaaaaccaccctgaccctgacggccatcgcccaagcccagaaatccggaggcctggctgcattcattgacgtggaacacgcgctggaccctcagtatgccgcccgcctgggcgtgaacctggacgacctgctggtttcccagccaagttccggtgaagaagccctgcaaatctgcgaggctcttgtccgctccaatgccattgacgtcatcgtggtggactccgtggccgcactggtcaccaagcaggagctggaaggagaaatcggggattccacggtaggagcccaggcccgtttgatgtccgccgccctccgcaagctcaccagcttcatttccaaggcccgtaccgtctgcatcttcaccaaccagatccgtgaaaaaatcggcgtcatgttcggcaatccggaaaccacccccggcggccgcgccctgaaattctacgcctccgtacgtgtggacatccgccgcatcggccagatcaagggcagcgacggcgtcatagccgggaaccgcaccaaaatcaaggtagtcaaaaacaaggtggcccctcccttcacggaatgcgaattcgacatcatgtacaatgaaggcatctcctccgtaggcagcctgctggatctggcaacggaatatgatatcatccagaagcgcggctcctggatcagctataacggcagccagatcgcccagggccgcgacgccgccaaggaagctctcaaatccaacccggagctgtacgcggaaattgaagaacaggtcaaggccaaaatggacgaaaagaccgccaaataatcccgcctgatcccgttccttcactgccatttcagggcggctccccttcccgggagccgcttttttctctccggaaacagaagcgcaaaagaatctttcacggaaacttttcccttgtgcgtcatgaaaaatccgttagtctggatgcgatatcgtcctatgtatccgacctctcgcacatcatttgcagccgtgctcggcattgtgggcatgtttctgctgacgttgtccacggccttcggatggaatccggaaatcattaatggagtgcagtatattcccatgtccgaggtgcgcacccattacaaactgaccagggaacgcacggaagggcggcagaaagtttacgaagtgccggaaaagattcaaatccgtatccaggcgcgcagccaggatatgttcatgaacaacatgaagttcgtgttatcctatcctgtggcggaccatccctccaaggggctgatggtttccaatatggatctgcacaaaatcattgacccggttttacggcccacttacatcgccaaccgccgcagtttcaacacagttgtcattgatcccggccacggcggacatgacagcggcacgcgcaaccgcatcagcagggaagcggatatcaacctctccgtgggcaaaaaactgcgcgaccgcctcaagaccatgggctaccaggtggttatgacccgtgatacggacaacttcattgccctccaggaccgcgtccgcattgccaacaggcacaacaatgccatcttcatcagcatccacttcaatgacggaggctcctctgcccgcggggtggaaaccttcacgctggcgcctgcaggcacttcctcctccatgtcccgcaatatccgccacgacgctctgcagggcaacgcccaggacagcatgaacattgccttggctacagccgtccaggggcacatgctgaaagggccgcttgccatcaaggagggcatttccatggttgaccgcggcatcaagcgcgcgcgctattccgtgctgtgcaccatcaagcatcccgccattctggtggaaggagggttcatgtccaacccgcaggaggccctgctcatcgccacggagcgttatcagaatttcatggcctcttccctggctgccgctgtgcatcaataccgcaccgcccttggccagcaagtgcgcagaacgcgctgagttccgtacctgtccccgggcctcccttcagcagcatgaacatcatccgcatccccggcctggcagattaccaggaaaccctgcggttccaggaacaactggtccgggcccatcaggaagacccggacagggaaaacgaactgttgctgctggaacatgccggggtttataccatcgggcgtacacggaaccacgccagcctgcaccccggttccgtgcttccctttcccgttcatgaaatcaaccgcggcggccaggccacctaccacggccccggccagctggtcggataccccattacggacctgaaccgctgcggcagggatctgcaccgctacgtcaccaccctggaaaacaccctgattgaaacctgtgcccggttcggcgtgcaggcccgcatccgggaagggctggtaggggtctgggtggaaaaccgtaaaatagcctccatcggcgtcggggtgaaaaaatggattgccatgcacggcttcgccctcaatataacccggaaatccctgcctcccttccttgctattaccccctgcggcatccagggcgtgcaaatgacctgcctggaggatgaaatgttctcccccctgccggaaggaaacctgttgaaatgtttcggagacgtttttgcagcgctatgggaagaaaaatttcacagggattaagggaattctgaacgtgcggagggaatgaaaaccatctttgccctgaagacggaaaggcgccaaaggctggaaagagcccccttctgaccatgaatgcagaggaaatgttcaaaaaaacgcctcatgtaagacacagaccgtgtcagcaatacgtccttgcatcttgacgcggttcccgaacggacggatgcttatgccagttatggggaaaacgcttttccaaaaaatctgggacgctcattccgtcggcatcctgccggatgggagaacgcaaatgttcatcgctactcacctgctgcatgaagtcacctctccgcaggctttcggaatggtccgggatctgggcctgaccgtgcgtcacccggaacgtacctttgccaccgtggaccacatcattcccacggacaaccaggcggaaccgttcgcggacgctacggctgacgccatgatcagggaactgcgccggaactgcgccgaaaacggcatccgctttttcgatatccccaccgggctccagggcatcgtgcatatggtaggaccggaactcggcatcacccagccgggcatgaccatcgtatgcggagactcccatacggccacgcacggagcctttggctccattgccatgggcatcggcaccacgcaggtgcgcgatgtgctggctacgcagaccctggccctcagcccgctcaaggtgcgccgcatcaatgtgaacggaaagctggcccccggcgtgcgcgccaaggatgtggccctgcatatcatcggccttctgggagccaagggcggcctgggcttcgcctatgaatacggaggcgacgtaatcgacgccatgagcatggacgaacgcatgaccctttgcaacatgtccattgaaggtgcggcgcgctgcggctatgtgaaccctgaccggaccacggtggaatacattaaagggcgcctgttcgcccctatcggtgcggactgggacaaagccgtagaacgctggctgggctttgcttccgatccagatgcggaatacgatgaaatcgtggaaattgacggggcctccattgagcccacgttaacatggggcatttctccggaccagaatacgggtatcagcggcagcactcccaacccttccgacgctgcgaacgacgaagaacggaagatgatcaacgaagcgctggaatacatgaaattccccgcggacatgcctcttaagggactgccggtccaggtgtgcttcgtaggttcctgcaccaatggccgcatttcagatttccgggaagtggccgccctcatcaagggacgccatgtggctcccggcatcagggcgctggccgttcccggctctcagatgactgcccggcaatgtgaagaggaaggcatcgcagacattttccgtgaagccggctttgaatggcgcctggcgggctgctccatgtgcttggccatgaatccggacaaactccagggagatcagctttgcgccagttcctccaaccggaacttcaagggacggcaaggcagccccaccgggcgcaccctgctgatgagcccggccatggtggccgccgctgctctgaccgggaaagtctccgatgcccgcgaagtattctccctgaattaacttttcaattttctcctttatgtctctgacccaattcacctccatcaccggcacctgcgttcccgttctgggaccggacatggacacggaccgcatcatccctgcccgcttccttaaatgcatcacgtttgacgaactggcgggagtcatgttctgggacgaacgcttcgacgaaaacgggcaatccaaatcccacccggtggacgatccccgcttcaaaggggcttccatcattttgggcggctccaacttcggctgcggttcttcccgcgaacacgccccgcagaccatcaggcgctccggcatcaaagccgttatcgcggaatctttcgcagaaatctttttcggcaacagcaccggaatcgggttgccctgcgtatgcgcgtctgccgccgacattgcctctctgtcccggcacatctccaattacccggaaacggaagtgacaattgacctcctgaacatgacagtttcctggaaagaagggtccttccccatccggatgccggcggaagcccgcgaagccctgacccggggccgctgggattccattgcggaactgcttgtcaacatggatgccgtagaaaagaaaaacgaagaactgccccgggtcgcagcctcctgctgattcagcattcacctctttcttccctttctaccctcttccccatatgattttcagaattacagactacgtccactacggcacgctggacaaccgtaaacgcggaaccgtccatcttacgctgcaactcatggggatgccccatccggtgaacattaccctgcatggggactgcctccaggacctggccggttgcgtggttgacttcaggaatccctccccacagatgcttcctgcggaacttacccaaatcccggaacatatccagggggtggcgggggatatgacggccagccgacgcatgcctgtcaaaggcaagaaaaccatggaaaacgccctgtacctggaatggttcaccagccatcacgacatggtgctgctggaaagtacggtcttctccatcaaagtttcccttcccgaatggatgatggattcctgcgaagagcaagcccagatcatggcgaaccagcagatgctgcgaacccaggtaaaagaatggtccagagcctattccaaccaccaggaggacggcagcctgcccgatcaccactgggacaaacgcctgcgggaggcggaagccatcgccatagcttaccaggaggtattccagaaatacaggctgaaccccagcggcgacatccgtgtggcttttgtcatgggctgggatgaagtgctggacaacatcgcccagtcggaagaaacggggacgccctgttcctgcaaaagcaccggcatgctcagcctgtttgacatcctcaacgaacaggaggcccgggaagtgcagtcctgcatgtttcatcctcttttccagcaggtaatggaactgacggatctgtgccagcaccggttcagccgggaaatcaacaaggcccagaggaacaggacagggccgccggaacccctgaaccagattttttactgcatccgctacatcaccccccgcattctttcctgcctcctccaggagaaggaggatgctgcggactactgcaccatggccgcccgtatggccctgtgcgtggaacaaacgcgccggacggtagctgccctggacaactgcggctaccaggtggacggtgaaatagcggaacgtttctcatccctgctggaggaagtcaattccttccaggaaagtctggcaacccaaagccgcaaaagcaacctgtaacaacaaaaccttccctggcaacacaatctttatctttgcgtatgatacattcccacacctgttttcaagggctgtgcgcagtcctggccggcgccgctctttcccacgcggatgagccggctgtttccatttcggacttcggggtggacaaggtcatgtccggccctgtcgtctccatcaatgaccaatacaagggcgtcgtaaaaattgagatggattccctgactccggattacgctactccgtggaataccggccgctaccagggaggcatcggcaccggtttcctgatcggggaaaacgctttcatgacaaacgcccatgtggttagcaacgcggagcgcatttatatctccatgtacggagattcccgtaaaattcccgccagggtcaaattcatcgcccatgacgcggatctggctctgctggaggcggacgatcccaagcctttcaaaggaatacgtccttttgaattcagcaaaaacctgcctcatctggaagacgaagtaagggtgatcggctaccccatcggcggcaacagactttccgtcacgcgcggcgtggtctcccgcattgatttcaccacgtacgcccacccccgcaacacggaacacctgaccatccaggtggacgccgccattaatccgggcaacagcggaggccccgtcctgatggggaataaagtcatcggcgtggcattccagggcctgaacaacgccaataacacgggttacgtgattccaacccccgtcatccgccactttctggaagacatcaaggacggcgtctatgacggttacgtggacatgggcattcaggctgcgcccatcctgaacccggccatgcgcaaggcgttcggcctgccggacgacgaaaagggcgttctgatcggcaaggtgctcaaggggtcctccgctgacggcgttctccgtaacggggacctgctgatgaaagtggacggctatgatgtggacagctctgccatgattgaactggacggccagaaaatcagcatgaaagaactcattgagcgctgttttaaagacgaccggctcccgctggatatcattcgcgacggcaagcccatgaaggtggaaatggtgatgaagccatccccctccagagaccttctgatggcggaatacgataaaatgccccgctacgtcgtctttggcggcctggtgttccagcccatccagcgcaacgtgctcgcggcggcggacatctccatgctggacgttgcactggacatccgtaattaccaggaagacggcggctgcgtggaccatgaagacatggtaatcatcaccaaagtgctggatgatgaggtaaacgcgcgcctgtccggctccatttccaattctattgtggaaaaaatcaatggcgtgaaagttaagggccttacccacgcctatgaactcctttacccggagaacatgccggaatacgtcgtcatcgaactgaaaaacggagaacgcccccttgtctttgaaggcaaggccatggagacggccaacaaacgcatctccaaaacctacaacatcccgaaaaacgcccgcctggacagctccattcccggtcgccagtctggccgcaacaccactcccgcccgttaaccgccatgaaaattctttccacttttttcttcggttccctgatattgctctgcggttgccagccgcgcgaagccggacgaaccgctcccgaaccccagcctgaacaacagacggaaacgcctgcggaacaggcggaggaaacgccctcgccggccccgcttccctcccccaccagctccatggtcggcattaacgccaccaaccagggctatgccatgattcagccgtggagcaaggaaaacccggcgtacagtcagggcttcggcatttatctgggagacggcaatatcctgacggcagccaatatcgtttattccgccagcttcgtggaagtaacctccgcagacggagcccagacggttcccgtgacagtaaccgcctttgacccggaagccaaccttgccctcctgcgcctgaaaaacggaaaagatgccgctttcctggacaaactggtccccgttacgctggggaaggctccccgcctgggcgacaaggtaaccttctggcaattcaatggcgacggccttcccatcactacctccggaacccttctggcgacggaaagcgcctgcccgttcacgaacggggaaccgttcgtcctgtataacgtcaaatcctccgtcactcccctgaaaggcggcgcaggcaaccccgtcatgaggggcaatgaacttgtgggcctcagcgccagctgcgatccctccgcacagaaagtgctggccgtaacccataccatgatttcccggttcctggaacaggcccgggccggcaattacaccggtttcccggcggacggcacccaggtcacggaactgaccgaccccgtcttccgcaaattcctgggcctgcctgaaactggcggcggcttttacgtggtgaaactgcctgtttacggctccttctacaaagctggagtacgtcccggagacgtggtggaaagcgtcaacggcatccctctggacagcaaaggtttaattaaggatcccgccctgggccccgtttccgccaactttctgttccgagactccgccaagccgggggataccattacgctgggcatccgccgcaagggaaaggacggctccagccagcccatgacgctggacgtcaaactggacaggagcgcccttgaaggggacctggtcaatccggcccccttcatctccaatccgccctaccgcatttacggaggtctggtatttgtcccgctgacgggagccctgatgggagaaatcaacaagctcagcaagaaccacccccccctcaacctggtggaagccactcaaaagaaagaggacatacggaaaaaaggcgtggatgaaatcgtggtcttcctgatggccctgcccacccaggctacactgggatacgcccagatgagcccctccattgtggaaaaagtcaacggcgtgcaggtgaaaagcttcaagcacctcaaccagcttctggaccttcccgctcccggcggcacgcaccgcatcgaagtgacccagcagccgtacaccatgtacatgtcccagaaggaagctgccaaagcggaccgattcatccagatgagggccgttcccgtgctccgcagggactaggaatccgcgagccatgttcatttgcagccctcctggcatgtctcttcacacgctgaatatccggcttgattttccctacaggacaggctttacccatggagccttccgcccggaaaatgatgctctggccagcctgatggaacagaggcccggaagccgcgttctcgttctcctggaaaaagggctggaacagttttatcctcagcttccggcagacattgaccgctattttgaaaaaaatgccggggtgctggcctatgccggctgccgttccgttccgggcggggaggaagccaaaacaggtttttccgcatgggaaacggccctgcgccacattgtggaagcaggcattgaccgccattcctatatcatagccgtgggcggcggagcgtttcttgacgtagcaggctttgccgccgccaccgcccatcgcggcatccggctgttgcgcatccccaccaccaccctctcccaggcagactccggagtaggtgtcaaaaacgggatcaatttcatgggccggaaaaactatctgggcaccttcgccgtcgcgtgggccacgcttgacgacttcctgttcctccattcccagcccctccccctgaaaagagccgggctggcggaagtagtgaaagtggcggtggtgaaagacgcctctttcttcaactggctggaaacgaacgcctccgcgctggctgtatgcgaacgggatgctctggaatatgccgtggagcattccgctctgctgcacgcctcgcacattgcatgcggaggagacgcctttgaactgggttccagccgccccctggacttcggacattgggccgcccattacatggaaaccatgtccggttacatactggggcacgcggaggccgtttccgtgggcatgtgcctggatatcctttattccgtccggaaaggatggctgcctgccgcggaggcggaaagaatcatctccgtgctgaaaaccctggaactgcccgtattccaccccctgctttcccgcaggacagaaaacggcgcctgcgaagtgctgaaaggtctggaggccttccgcgaacacctcggcggtcacctgacggtactgatgcttaccggaataggccggggaaaagacgtccatgagatagacgccgctctgatggaggaatgcatccgggaaatgcaggaagccgctggatattccgttcaggaataacagccctttccttgccgcctccccgtcagaaaacaagcagaagccatctggcgtatcacagagaaataccagccggacggcagtatgaaaaaaacaacgacgtttttccttcccacaatctccatatcctcctgttccggcagttcccgcagggcggcattattatgtgctgccgggcagcccatgatgcaagccattttgcgactcccccttttttcataacgcgccggatttacttctcctttttcaaaaagaagatgaaggaaaaagcatgaacagcctgccggatacctcaaagagaagatcatccgtcaaccatgcggaggcagtggacacgatgcctccctgggaacaaatccattcatcgtctttgcaaggcactggaaaaccaaactgccggaaaccgcgttccgctgaaaattcagggatggatcttccggaaaaccgtccctcttaaacctgtgcggataactccgcaggaaacggaactttcccgtattcgtccaaactgacgccgggccatccccatttacagacgcggtacggcggcgagaagcgcctgcgtatattcgtgggaaggggaagaaaatactttgtccgcctccccgtattccacaatgcggcctttgcgcatcacggcaatgcggtccgcgatgtaatggaccacggacaaatcatgggaaatgaatatcatggtcaggctcaagtcgcgggccagggcaataagaaggttcagaatctgggactggatggaaacgtccagcgcggaaacgggttcatccgcgataaccagcctgggttccggcgccaatgcgcgcgcaatggcgacgcgctggcgctggcctccggaaaattcatggggatacttgcgcatcagggaggggctcagccctaccttttccatcagttccgccacatcatccctcgtctgggcaaaagttcttttacggcggctctgcaacgcctcctttaatgttgcatataccgtaaaacgggggttcagggaagcataagggtcctggaaaaccatctggaaatccggacggcgcttcctgacttcggatgcggaaagagccgtcaactcttccccttccagaaaaatgcggccctccgtaggcttctggagcagcatcaccgtgcgggacaacgtggatttgccgcaaccggattcacccaccagccccaggatttctcccttttccacggacagcgacaccccgtccaccgccactacgggggcagatttgcgggcagagagcagcccctgcaccgcaggaaagacaacgctcacatgatccagttccagaaaagccatgccgccaccctaacaagccttccgatgcaagacaagaccccagccgcgccagttcctccaatatcaggacatccatgcgcacctcccatgccgtttcccccacagaaaaaccaggaccggcaatgaacgccagccccggctgggcatttcgcatgtcttccggagccacccggaaccagaagggttcatcatcacacacgaggctgataacagcaaaagaggctgttcccccatttccaccatccattggcctttttgaagaactataataccgccaagaaatatcagggaccgcacacaaggaaaaaacacgctccagcccaaaagcgctccaaaaacggctgccaggatgaaggccgcaaccagcagcagggccggagcttttctatcccgcatattttgatgatcccctatccggatttccggatcctccctgaatcaaatttatggataaatccccccatggagccatatcaaacaaaagaaccgttccccgcaaagggaacggttccagagatactctgactcagagcttacgcaccgagctggtagcggacgaaggaggcgacggagatatcgtcgccgagttccttgccggcctggttgaggagggcctccaccgtcatctttccggcagggtccttcacaaatacctggttcagcaggcaggactgggcgtacagagccttcagcttgccgggaagaatcttttccagcaggtgttcgggcttgccttcctgaatgagctgctgcttggcgatttcctgttcctcggccacgaaggcgggatccaggctatcggagctgacgctcttgggagcggcggcggcgatgtgcaaggtcaaatccttggcgagggctttgaacgcatcagacttgacggtttcttccttgccggccttgatggacagcagaacgcccactttgccgcccatgtggatgtaggagaccacggcgccgatgccgtccgccgtcaggcgggcgaatttgcgcagagccatgttttcgccaatggagctgcacatggccttgatatattcttccgtggagccttccgccatggggacctggagagcctcctccagcgtggaggccttggaatccatgagagcgttggcaacgtcattcaccagaccctggaacttgtcccccttggcgcagaagtccgtttcacagttgagttcaaggatgatgccggagcagccgcagggagccacagcggcgcggatcacgccttccttggcgtcacggtcggccttggccgcagccttggcaattcccttctcacgaagatactttacggcggcatccatgtcgccgttgcattcgttgagggctttcttgcaatccatcatgccggcgtccgttttgtcacggagggccttgacgagagctgcagtaatttctgccatagtgtttctgttctttctaaatggttggtttaggcttcggcggatgcgcccttgccttcgttgatggccttgacaatgcagtcaagaatcaggcggatggaacggacggcgtcgtcgttgccgggaatcgggaagtcgatttccttcgggtcggcgttggtatcaaccagaacgcagacgggaatgttcaggcggtgggcctcgcggatggcgatgtcttcatggtcggcgccgatggccaccatggcgtccggagcgccgcccatgttgcggatgccctgaaggttgcgttccagcttctggcgttcgcggtccagagcggccagttccttcttggacatgctcttaaattccgggctcttttcaatcccttccagatagacaaggcgttcaatgctcttgcggattgtgctcatgttggtgagcatgccgcccagccagcggtggttgacatagtactgaccagtggcttccgcagcttcgcggacggcttcctgagcctggcgcttgcagccgacgaagaggattttcttattgcggcgggccagatcagccaggaaggagcaggccttgtccaggcatttttccgtttcctcaaggttgatgatatggataccggccttgtccttgagaaggtactttttcatgctggggtgccatttgcgggtctggtggcccaaatgaacaccggcttcaaccatctggttaatcagatcattaatcatatatgtatgtaggtggctttccttgcggcaggaaaagcagtttttggggacttcgacgctttttacccctccgatccccgttgtttagttgcgccgaatcacgcgaggggcgggcaatatacttcccgccccctctcttgtcaaagcataaatcattgatttacgaaactattccgccgttcgcggaaccttgtcgcaagcaagctcatggagaactttgccatttcagcaaaatatcttaccgcgcaggcccgtcaaaaccgttcccggcagactctcccatgcccgttttccagtattcccgttccgcttgcaaataaaacgcaccgaacggagggaggatttttaacgttttcccatgccgtgcggccagttccgaagagggcatgtcctcccgcatatgcttcccttttccaatcaggaacggcagcactaccaccttttgcccctttaatccgggtaataccttttccacagaaggaaatgcgccaaagtatgcaagcgccatgtccgttccttccggaagccggaatttcaactgctggaggaattgcgccggctcaggggcagcctcccttcccgttaccccgtgggctaccaccagcagggaagcctccccctccaattccttttgcaaggcggcggccctaaaaccaacaccgccgcatcccgctccccatacgggtttaaaaacaagttccggatgctgcccgctcccggcatacagcgcacgaagcaattccggcaatgtctccgtcaccgtcacgccgctctgcatgaagacagggtaaacccagactacaccatcgcccggaggcaaatccgccgccgtcaggctgcggaaagacgcctgccagacacaatcgcttgaatattgaaactgctccgccacatgctgccgcaattcagcccctgcttcatcataggaaataaagagtttgtaaatcttcctgggcatttcggtaagaccactgcgggggaacggcgttcggaacatcctgtcatttattcatgcggaagtaacgcatgatggccgtttgtaacaaaaagtccggagggcggcaactccatacgcttttttccaatccatgctcccctccatttacacgcacctatctaaaaaatatttaccatatttataacaaaatcattatatcgaatataaaaagatacttccggaaaaataaaccttcgcctccgaatctccgcgcggaggcaggatagcggcttgaccgaaaggcctgaaaccgtcatgatacaaggacatacaggttttgttttatgtcgttttacattcaatccgttgaaatcggcggcccgcggccgttctaccttctgggcccctgctctctggaatgcgaatcctttgtatgggagatggcccgctccatcaaggccatcgcggaaaacctggatgtcccgctgattttcaaagcttcctacgacaaggcgaaccgcacttccgtcacctcttttcgcggtcccggcgtgcgggaaggctgccgcattctgtcggaaatcggcagggagctgaaactgcccgtcgttacggatgtgcatacggcccaggaagcggaaattgccgccgaatacgtggatctgctccaggttcccgcttttttgtgccgccagacggatcttctggaagcctgcgccaagagcggccggcccgtgaatatcaaaaaagggcagttcctggctccgtgggataccgtgaacatcggggaaaaaatgcgcgccttcggctgtgacgaattcatgatgtgcgaacgcggcaccacctttggttataacaatctggtggtggacatgcgctccctgtactggatgaaacaggaaggctttcccgtcatattcgacgccactcacgcagttcagaaacccgggggattgggaggaaccacgggaggagacagcgagctggcccccgtgctggcatccgccgccatggcgacgggcagcattgacggcgtgttcatggaggtgcacaaagacccgtccaaagcgctttccgacggccccaaccaaattcctctccacctgcttgaaggagtgctgaaacgccttcagtccatccaccaggcggttcagtcatgatgaaattattgtccacatgctttttgacggccgccctgtacggcacggaggcgcaagcggacaccagcctgcccgcagccacgccttttgccggcgtagataaaaaattacctatgctggagcttctgcccgtaggccaggtgctcccaaaagtcagcctgtcacgatatgaagggccgcgcctttccatgctgctgacggcttcaagcgtgaccgtggccgccccgcaggaaattgccgcgaatatcctgaacgtgtacttgtacggaaaaaacaaccagacctcccaccttttcacgcaggccgcctcttattttctggataaaaaactggccgtctcccatacggaaaccaccctcagggaagaaaatctttccgccaaagggaccggcctttacctggacaccaatatcaagaggggcatcattctgggtcccgttcaaaccaccatccgcatggctcaacgcaacaagtaaccattcctttttatgaaaaaactttcctccctgctgctggccctggccggaagccttgcctgcagcggcgccaacggcgttccctcccacattgtccagcccctgcccagggaactggatccccgcctggaacaacccctcaccccgccttcccatattgtacgccccctgacggaggaagagacagcccggagggaacgggaactggcccctgttccgaccgcaggcttgaaggaagacggggaaaaggcgattcaaacatacagcgcgcaggaaaaaaccgtagacgggcggattcaggaattccgccagcagcaccagattgccggaaatacccctgccccggctgcggaaacgacttcctcttccgcagcatccggcccggaggaaggcttcctgcaggccaattccccaaaagacctgtacaccgtagattgtgacggagacttgtacttcgatatggaagagggcgttctggtgttcatgaaaaatgtccgggtgcgcaatcccggcctttccctggactgtgcggatcatctgaaagtttacgcggaattcgtgccgaaaaaaccgggcgataaaaaaccctctgacattaaaaaggaaaagggaaaagagggggaccaaactcaggtggctctccccaacggaggcaatttcgactacaattccattaaaacagtcgcggcttccggcaacgtaaaagccagttacaccaacaaacagggagaaacaagcaacgcccaggctgaaaaaatcacctacaacgccaaaaccggagaaatcatcctgacgggcgtcccggtcatcgtcactccggacgtcatcgtgaaaaatccgaacaaggatgctttcattcgggtgtactccaacggaaacatgtacggcagccgcggaaccaagacgacgttccgccacgtggacaaaaaactttccgaccgggaaaaccagaaaaccagccgcaaaccgtgagttcgttctactcttctcctttgctaagcgccgaaggcatctgcaaaacctacaaaacgcggaccgttgtggaccaggtcagcctgaaggtaggccatggcgaaatcgtgggcctgctgggaccaaacggcgccggaaaaaccacttccttttacatggtagcgggtctcgtacgcccggatgaaggccgcgtgatttttgcggacgaagatattacggaattgccgatgaacctgcgcgccaggcgcggcatgggttatctgccgcaggaagaatctattttccgcaagctttccgtggaggataatcttctggccattcttcagacccgcaaagacatgacttcccgccagcaaaaggaccgcgccgtagagctgatggaccgcttcggcatcaccaagctgcgccgctccatggccatccagctttccggcggcgaaaagagaaggctgaccatcgcccgcgccctggctaccagccccaaactgctgatgctggacgaaccgttcagcggcgtggatcccatcgccgtttcagacattcagaaaatcgttatggaactgcgcgatacggacggcctttccatcctgattacggaccataatgtgcgggaaaccctccacatcgtggaccgtgcctacattttgtttgaagggaaggtgatcaagcacggcacttccgaggaaatcgccaacgaccccatcgcccgcaagcagtatctgggcgaccagttccgcatgtaactttattttccgtctttcccatgtcttccccgcagaatacgatcgccctggtcttcgactacgaccagaccctgagtcccttctacatgcaggatcaggccattttcccggaattcggcatttctccgcaggaattctggaccaggtgcaacgccaccggagaaagagaaggctgggacggagaactgatttacatgaaaagcctgctggacgccctttccctggaccgcgtcagcaacgcccggctcacccagcttggagaacgcctcaccttttaccccggcctgccgaacttttttgacgcgttcccgtccatgaccctctcctcccttcatacggatctgggcatcagcattgaatactatatcatctcctccggtttgaaagccctgattgacggttccgccctgcgcccttatttcaaggccgtattcggatgcgaattcagcgaggagaacggctacatcaattttcccaagagagtcatctcccataccacaaaaacccagtaccttttccgcatcaacaagggaatgctggattacgaccaggacgtaaacgaccacatgccggaagacatgcgccccattcctttcgccaatatgatttacatcggcgacggccctacggacgttccctgcttcaccgtcatgcgccggaacggaggccacgccgtagccgtatataatccggaggatgaaaccgggcgcagtttccgcaaatgctataacctggcctccaattccgaccgcgtgaacttcatcgccccggcggactatacgcccggcagccatctcacccgcctgctgtccggcatggtcacggatatcgccaacggcattgtgcgccgccgggaccgggctctggcggattcctgtattgcggctccttccttttccaaataaaacccgctccattcctctccccgtcatgaacagccatttccactttctcggcatctgcggcaccgccatgggcgcggtagccgccgccatggtccgccgcggctttaccgttaccggttccgacgccaacgtctatccccccatgtccacttttctggaggaggaaggcatcaccctgtttgaaggctacaaggcttccaacatcccgccggatgcggacgtcatcgtcatcggcaatgccatgagccgcggcaatgaggaagtggaagccgtgcttcaacggcgcctgcgttacctttccctcccggagacgatgaaggaatacttcctgcgcggcaagcgcaactatgtggtaacaggcacccacggaaaaaccaccaccacatccatgctggcatggctgatggaggattccgggctgaaccccagcttcatgatcggcggcattgcccgcaatcttggccgcggcggccgttttacggattccgatttttccgtgctggagggagacgagtacgacacggcgtttttcgacaaacgctccaaattcctgcactacctcccggaactggtggtcatcaacaacattgaattcgaccacgcggacatttaccattccctggaggaaatcaagctgagcttccgccggctgacccagatcatcccccgcaacggcctggctctggtcaacgcggacgatcccaactgcctggacgtggttaaaggagccccgtgccccgtcaagacggtgggtttttccgactcttccaacatccgcatcctggatgtggagacctccacggacggcagccatttcacgctggaaggaaccaggtactatgtaccgatgattggggagttcaacatccgcaacgccgccatggcgattgccgccgcacaattcgcggggctgaacgtcaagcagctggcggattccatgagcctctttgaaggcgtggcccgccgccaggaagtcaagggcgtggtcaacggcatttccgtagtggacgacttcgcccaccatccgacggccatcaaacaggccatcctgggcctgcgccagcgctatccggaatcacgcatctgggccattttcgaaccgcgctccaacaccacgcgcagaaatattttccagaatgaactggcgttgtccctcgctacggcggatttccccgtggtagccgccgtggatcatccggacaaggtggccctggaggaacgcctggatctcaccaaactttccagcgacctttccgctctgggcaaggacgctctgatcggcgggcatgcccaggaaatcgtctctgccgtctgcaagaaagcccagccgggagacgttattctggtaatgagcaacggcggttttgaaggcattcacgccaaattgctggaagcactgaacgcctgacccttcttcatacacccactttcaatgaaaaacgcatccaccatcaccgccttcatcatcagcttcctggtcgtaggcagcctggccctggttttcctgttccttgacaataaggaagaggaacccgccgccgctgaaccggcggcgcaaacggaagtgccggcacgccagacggtaacgccccagcccaccgtcgagccgcttaccaaggaggatatcagccggcagacggctacgccgccctccctgatcaatctcagctccccccagacactggcgcaggcaattgccaaagtcattcaggaccgggatgaggacatcctgaaatccctggaaatccagcaggccgtgacggagaaccagagccgcctcatccgggaactcatggaagcccgtcatatacgcctttcctctcccggcatcaccagcatcggcgcgaacaaccagggagccaatcccacagccagatacacgctcaatttcagcagcggcgcgcgcggctatctggatatgaagcgcaatgacaagcaacagtggacgctggataccctcactctgcccagcaagcaggatctggccaaggacaaagtcgcccccatggcgatgaatgaccccatgggcatcgtcagttccttcatggatgccgtcgccaaggcggatttccgtggggcgaggaagttcgtggacggcactaaagtgcaggatgccacagtagccggtttgtgcattctgtttgaggagggggctttccggctccgggaggacgctcccattaaaaccgcctacgaagcgcccaccaatgcggggtttttcgtccatcttcaggacgcccagggcaggaaggccggcaatgtaggcctgaccgtagccaaaacggacggacaatggctggttgcggaagcttccctggacagcatgctggaagcctatacgaaacggcagggggccggagacgacatctttatccccattgtaaaaaatccccagggcggcgattccctggccctgttcttcggctttaatgaagataccctttccaagcgttccgaacgccaactgcaaatcgtagcggaagctatcaagatggacagtggcaagaagctggaaatcagcggccatacggatgacgtgggaagcgaacgctacaaccaggggctctccgaacgccgtgcggccgccgtgaaagcccagctcgtccagttcggcgttcctgcggaaagaatcgttaccaagggattcggaaaatctcagccgcgccggacctactctcccacggcagacgaagaaacaagggatgaagcccgcaaggaaaaccgccgcgcggaaatgtacctggacttttaaaagagtaatcagagagcagagaaggggcaagcctttccaacttctccattcactgttgcctgtcaattattaaccatattccatggctcgccgatacgtcatcaggcaggatgccgcgccggtcgcccccatctccgggatcgactatcgtacggccctcaatgaagaacagtacgccgccgtttcttcagaaccggggccggctcttgtcatcgcaggagccggatcgggaaaaacgcgcacgctgacttatcgcgtggcctggcttctggatcacggtacggacccatggaacattctgctgcttaccttcaccaataaggcggcgcgggaaatgacggaacgggtgcggtccctgattcccctggacttgtcccgcctgtggagcggcacgttccattccattgccaaccgcatcctgcgccagcatgcggaatacctgggatatacaccggctttcacaatcatggactccgacgaccgcaaatccatgattaaaagcgtggtcaaatccctcaaactggatgagaaatccacccgcttccccaagccggaagttctttcctccctgttcagtctggcagacaacgagggagccaatatccgggaaacgctggaaaacgcctatccctacctttccaaccacctggacgccatcctggaggtgcatgaccaatacgtagcccgcaagcaggaaaccaacagcatggactttgacgacctgcttctcaacgtcgtgaggctttttcaggaacaggagcacctgcgtgccctgtacggttcccgcttccagcatattctggtggatgagtaccaggacaccaattacctccagagccgcctcattgacatgctggcccgggaacacggccagctgatggtggtgggggacgatgcccagagcatctactcctggcgcggagcggacatggaaaatattctcagctttactacccgctatccggcggcaaagactttcaagatagaaaccaattaccgcagtgtgccggaaattctggagctttccaacgcggctatcgccgccaacgaagttcaaattgaaaaacagctccgctccgtgcggcccaccggggaaatgccccccgccctcgtcccgctcaacgacgaccggatacaggccaaatttgtcgtccagcgtatcagggatctcattgaagaaggcacggaccccagtgaaatagccgtgctttaccgcgcccacttccacagcatggaattgcaaatggaactgacccgcggagaaatacctttccgcatcaccagcggtatcaggtttttcgagcaggcccatattaaggacgtggtggcatttatgcgttttgtggtcaatcccagggatgaactttccttccgccgcatggtaatgctgctgcccggcatcggccccggaatggcccagaaactctggatacgctggaccgcctgcccggaaagccggcaggaaacccctccggaatccttttccgccctgatgttggatttcccggttcctgccaaatccagaacggcctggacgcagctttgctacacactggatgaactggcccccgccggaaagctggccggtccggcctccatgctcctttccatcaatgaggccgtgtacgacgagtacatgcaggccgcattcgaaaattacgaccagcgcaggcaggatcttctgcatctggccggattttccgaacgctttgaatccacggaggattttctttcccagctttcccttttgggcaacacggatgatgaaagcgccgcggcggacttctccggcggctccgtcactctgtccactatccaccaggccaagggactggaatggtctgtcgtcttcctgatcggcctgtgcgacggcatgtttccgcaccagagggtcattgatgacggagacctggccgggctggaagaagaacgccgccttttttatgtaggcattacccgcgccaaggaccagctttacctgacctacccccgctggaactgccgcgcccagggaggaaccttcatgcaaatgccctcccgctttctggatgaattcccagccggcctggtggaagagtgggaggtggaataatccagctctcctctcccgggttgtatccgggaaacgccggttctcaatcttctcccgccggacagggaaaacgcggcgcggagtttccgaagggttcttttcccacccatttgcattcctgcttccaacccttatccggagatatttccgtctttcccggagaacggaattccccgacaaccccggccatattccaaaaaccgtggacaccgcggctcttaccgcatccttccgtttctaccgctgcggttcatcaccgccatatccagcaaagccaatacccacttccgtattttgcttctcaaaacgcttgttgggaagcatcccaaaccctcttttcattcctgctggtttgcaaaattaaatatatagctttctgattttggcgggaaagcgcttagggaaatatttcatatgcgtttttgtaagtaagtatttacggaatatactgaaatccccacttcgtcatttcatagaatacaggcaacaatgcctgccccttttccgtaagagagtattcaacacggggcggtatctcgttgaattgcattctggatacaagcccgtccttttctaattctcgaagggaagaggcaagcatggtatttgtaataccattaatatttttttttaactcaccaaagcggatgggatcttgaataaacaattcataaaggatttgaaatttccatttcccctgcaacataagcagaagtggagtcacaggacaattccccgcttcagtcaaaattccctctttcacttcatgcctgtattcatcgtaggttatatccttgtgcatgaaaaatgccttcctttctctattagtatagtcaaccgtactgagtcagaataatatgcgtacttgaaaaaaattttatccttagtataattatcttactaatagaagtcaacaagtaaagttaaatatttataatcgttttacaatgaaagaaatcaatataggtcaggcgacggctatcacctctcccaatcctctcgtgttggtttgcaccaaaaaagagaacggtatgctgaacatggctcccgtttcattcttcatgtactcctcgtttaaccctcctatgctggcctttgcaatgggtaaaaccgccaattccggcgaaaatatccgcaagaccggcaaagccgtactcgctgcccctggcgtcagcttgaaagatgcggtcatggcttacggctctaaaaacggcgggcagattgacaaactgaaggaatttccagtcgctctgcaaaacattgacggaacagacattcagatcccggaggacagccctattgcttttgtggcatcgctagctgaaactgtggagtctggcgatcattacctgtatctctgcaatattgacaaaatagtggcggacaaaacaaaagaagccctgttcgcatggaatggttatgccaaagttgccccggcacaggaaaaataatttgatgccgtcagcggggttttcatggttttctgtgaaagccctgttcttttccaaatatcaaaatctggcgatggggatgatataataaagtgtataattaaaaaaaagcgacacttatgagccagttttctaattttcaaagtagaccggatcacattgaaatccgtggcgcccgtgttcataatctgaaaaatattgatttagatatcccgttgggcaagctggtaggaattacgggggtgtcaggatcaggaaagtcctctttggctttgggcgtactttatgccgaaggttcccgccgctatttagaggcattgtccgcctatactcggcggcgtataatacagatggcagaggcaaaaattgacagtatagaatatgtcccagctgcccttgctcttcgtcaacgtcccgctgttcccggtgtccgcagtacatttggaacggctaccgaacttttgaactcaatccggcttatgttttcccgcttgggaaatcaccgctgtcccaatggacatttgctttcgccatcggtcaacgtcgcggcaatgcgtccccttgtctgctctgtatgcggagcggtatttgacggtctcagcgcagaaagtttttcattcaatggccaaggagcgtgtcacacctgcggaggaactggaattgttcaagcagtagacgaaacaactttagtgcctgacgagtccctttccattgacgaaggagcagttgcgccgtggaattctttgatgtggtcgctgatgactaacgtatgccgggcgatgggcgttcgaaccgatgtacctttttcggagttgacagaacaggaacgggagatcgtctttcatggtccgccagaaaagaaacatatcctttataaagcaaagagcagcaatcaagcgggagaaatggattttacctattataacgctgtttataccgtggaaaatgcccttgctaaagttaaagacgaaaagggaatgaagcgggtagaaaaatttttgaagcggaacacctgcccgaattgcggaggctcccggctcaataagcgggcgttatcaagtctgctatgcggaaaaaaccttgcggaaatcaccaaaatgacattaagcgatttaaccgcttggataaagacgatttctgcttccatgccggaagaactaaaaacaatggcggaaagtatctgcggtcaatttctgcatgtatcaaaacgtctttctgacttaggtctggattatattacccttgaccgggccggaacaacgctttccaccggagagcgtcaacgcgtgcagcttgcaagggctgtacgaaaccgtaccacaggtgttctctatgtgttggatgaaccgtctattggcttacacccagcaaatgtagatgggctgttgggcgttatagatgatcttattgcccatggtaattctgtgatattggtagaccatgatgtgcgagttttaaaggctgctgattggttaattgaaatgggcccaaaagctggagagcatggcggacagatagttgcacagggaacgattaaagcagtagcaaaaaaaacgagttcactcatcgctggatttttggcagacaaggaaaaaccggttatccgagaaacggcaacgccggaggccatgtttgcacatgggcatatcaaactgtctactgctcctttgcatacagtccatgcccttgatttagacatccccaaaggtcggctgattgctgtaacaggagtttccggttccggcaaaacaacactgattttggaaagtcttattcccgccatagaagctgccatagcgaaagcgccgatgcctgaccatgtgaaaagcgtggaggtagccggtattgaacgtataaatcttattgatgcaacacctattggcgtgaatggccgttctaccgttgcaacatacagcgggatattagatgatttgcgccggctttatgcagctatcccggaagcaaaatcaaaagggtataaagtaagtgacttttcctataatactgggtcactccgttgctttggttgtgacggaacaggtcaaattacaatggatgtgcaatttctcccggacgtggatatcatctgcccggactgcggcggctcccgctatgggaaagaagcggaggcaattcgttatcgctctaaaaaagacaaggtgaacgcacccggtatttctctgcctgtactgatggggatgaccgtggagcaggcgttagaacgcttatgtgacgtgaaaaaggttaaagaaaagctccaaattctttctgatttaggtttgggttatttaactttaggcgaagcaactcctgccctgtccggcggtgaggcacagcggctaaagctggcggctgaaatggaaaaggcacaggacgacgccatatttgtatttgacgagccaacgattggacttcatccgctggatgtacggatactaattggcgtatttcagaaacttgttgatgccggtgcaacagttatcgtcattgagcatgatttaaacatgattgccaattccgattatgtggtcgatatggggccgggaggcggcaaagcaggaggacaaattgtagcaactggtttgcctaaaaaaatcgctgaaacggctgaaagccttacaggaaaatatctatgtgaaataatttcatagaaacgtaaatctgtaggacgacggtaaaagaaaaagccgtcgtgcaacagcattttgatactcccaaattaaaaggagattatatatttgacttaggtgttttgtatttttatagatgaaaaagagaagttttatcaggaagaatatatatgactttttatattacagcgttctaaattatttctactcactcgaacacacttagatagactattatgtgttttttttcataatcttcatctgggtcaataagaataatttctttagcatatattatgatggaatcttcatctagcttagatttaatattacgccttttaaatttgtgatttttccgtggcggatttttatctggcattttagattttaagtttattgttgacatgttatattgatttattttttgataaggtcttacagtcagtagtttttctaatttagaaaaaaagattaacttacttctacaacattctaaatacaactttatagctttaaattcaaaattacttaattttgtattcttttcattatcttttttaacaataaattgaagcaacccaaaaatgtttccatcaggacacaaaaggggaactccgatgtattgtaaatattttttatcatctttaggttgatgaataaaattcttttctatttcttttctattcttataggacacaacttctttgatgccgttcaaaaaaatttttcatagaaatatttagagactgtttctataggaatttctcttccataaattgaaggcgtatcagaattagattcatcttcctcccaatatatcatctttgtcgtattgtcatttaatctttgtgtataagaaatttcaaaagccaacttaggattataattctctatggtttttaatatcgtgctacatatagttttacacgcgagcttaaaactccaatgtaattcaagttttttagcgttttttaaattattgcttgcactgtaaaattcttgagaaaaatcttcacatgcagaagataatttatgattagaatcttcatgcatttttatcgttttattcaaaatttctactgtttgcgttttatctatttcaattatatataaaactatgtatataatagcaaggataattaatataaagtctttatcagtcgaaaatttattaaatatcggaggtaatttattaaaatcaattgttccaataaatgttattaatatgaacaaaacagcatttacagtctttagccatgtcaaaccactcattaaaaaatatgttttcctaaggcagaggtatcattaatctcttatggcgacaatcattttcatctaacatttttcctttctacctcgcttagtaatctgttcagtataaattttccattcagatagcaatttgtaatttaggtacacaatgtagccttcattcatcaaatgatacaaggaggctcgtacgttgaatgcatctaaaacgggacaactattctgaggaagtttccttttcttatttacaccctttatcttctaacgttcttttagctgttccttccaccgcccataccacaaattcctcaacgctcatatccttctgaaccgccgctcgaacggccaaattgagaattttgttagggataggaacgctcagttgagaaacaaagtcattgttggaagcaggttcccgtcctttcatatagcgggaaatcagaatctggacgtgcttcggaatactgcccttggagaaatagttatcaatggtgcttctggctagacctagggaggaagcgagttcggtgcgagacactttgttcttttctaaccaccttcccaaagtctgaatatccagcgggcgtttctcgtccatgcgggcaattttctcctatcaggaggatgaatggaagaatccgaactgtttagggttgacaaaatcctattaggataataatagctcttttattgggcaatattatatctcattaggataattctttgtcctctctaaggaatccaaaacctaaaaacatcatgaactcgaaaacaatcatagccagtttggggcttctgggcctctcatgtaccgcccaagccgcctctggtgacccttggaactattatagggtaggagggaattatagctccgcatattcaacacggtatgattccaattttggaatgagtatcaaaggtatgtatggattccattcggggaatgattatggaatagacatgccagacctgtacggtgcccaattaggacttcacgcaaatattccatcgggttctgttttccatgaactatctttcaatctcggcgcgcttacaggctctaaaacctacggcggcgtgctgaagtggaagcaagaagtatttccctttactgctggatattcctttaatgtccccttatctgattcagccactttctatttaggcggcaagattggccttcactattataaacaggaagtttccttaggcggggaaaaagcgtctgaatctgattcgagcggaacttactcggcattaatcggtttcaaatttgctgtcgcagaaaagacagatatcgttattggatatgaaataacgaaatactggtcagatgttgacccatatcattttatcacagttggttttagctggaccttctgacctccttcggcggtgaattaactggcctccttcctttcggggaagggggcgattctttgatttgcatgagtggccgtcaccttattctcagggtggcggtcaattcttcaattcagcgtaagtgattctcgtcgaaaatgctctagccataagagcatccaatctcacccacgtatggattttcacattcccttcattcaaccgataagcaaattcatctacatatctctgtaaatgttttgtgctgaatgaatggtagattccatagaatcctctcttcaaaaccgcccatacgctttcaatgccgttagtatgagccattccgtcaacatactgtttggcactatggtttaccacctgatgattgaactgtgactctttgtaggaagcatgttcatcagtaaccagaacagaatcccggctcaaatacttattgagaatctgatgaactgtatctcttgaagtatcgggaataacccttgccaaaacctttcccgctctggccctcattcctaaaaccgccgtctttcctacaatttcgcgccccgctttcaatttctgcgattcgtgcttattggattccttgcctccaatatacaccccatcagcttcaacgattccagacagaaagccgttatcgtcatcatggttggaattgcaagcttctctaatcctttgaagcataaaccacgctgttttttgcgttaccccaatttctttagaaagttgcatggagctaataccctttctggaagtcactactaaatagaaggcaaaaatccatttatgaagtggaacatggcttctctcaaaaatagttccagtcctcacagtataaactttcccgcactccccgcattcaaaatacccctcaaccccattccttttcaccctatactgcttttcacttttcccgcaaaacgggcaaactaccttatcaccccaccgtttttcctctaaatacctttttgccgattcttcattggggaatatttcaaaaagctcaaaaagtgaaatagttaagcggtcgttcatggttgcctccttagtatggctaattaatagcatacggagaaaccgaagtcaagtatataagacccaattaaaaaatggcggtctcgggattctcaaagccgccgttttttatcctctctctgaatgtctgaccttcacggttctgcgcatatcaaggctcttttcgtaaaattagtaattgacttctccatatccgcgaaaataactgttttcaagaatttttagagataatcaaaattgttgctataaaaaatgaattgacctggatattcttgaaattccttcccggctcaaaactgaaaaaacatgtcatgattaaattatttgaagaagaaatataaccaattcatcatgaacaattttaattattattttcattaatttctctcatgtcattccggtgaacgaaccggaatgagaatcatctaaaatctcgggcgccgtgattgtcacgaacgcataaccatctaatcattaaacaaataaaaagcatgaaattaagactcccacatatgctgctggcggctgttatcgcctgccttggcagtttctccgttgctacggcagctgactatgcagtcaacagtgccgatgaattcgttacggcctggaaccaggctgccgcttccaatgaagcttcaaccatcacgattaccgtaccttccggctccgataatattacgctgacccaagagcaacgagcccagttgaacgccatctccggaacgggcaacgtcaccattcaaatgacggacgccagcaacaaactggttaatttcaattacgatctggttaacaaccaagtcagtttcaacgacgtcaccttgagtgaacctctgggaagcgacaatgacattgtagtgacgaatgcttcaaataccacaactattgatggcaggaatattgccatcgaaggtacgaatgatgctgccaatcccaagacagtgggagccaccgtcacctccacgaacggacaggtaggcatcggcgacaatgtttccatggaaaaagccgttaccgtcaccggccaggcagctcaaaccgtagatccggcaacgccgccgaccggccaagcctataccaagacgacgtacaatacttacaataattccaacgaacaggccgtggtcctgggcaacaacgtcacgatgcaggataccgtaacggcgacaggccaaatcgtaagcgatccggcatccaaggttgcgctgaacggagatgtgacctccacagcgggaatcggaaccgtaactacggaacagtttgacgcctccaacgcccagaccggcaaaaccgtcatcgactctatggatgacagcgtctccggcggcatcattcttggagaaaccacagccgggaccgtcaccctcaaaactgagggcggcaatatttccctgggagacaattccatcctggatggcactactgtttccgcagaatccgccgacctgaacaaaaccgtttacagcaatgacggcggcagctggaataccgtcgcaagcactgaaaagctgggcaccatcgaaggcagcgtcacgctgggtgaaaatactaccgtcaagggaaattccaccctgacagcggatgacaatatcgccatcggcaacaacagcgtcatcaccggcaataccgccgctgacggcgtgatctccgcaggtggccagatttccatcggggacggtacccaggtcttggacaacaccgccaccagcgacggcaaagccgccatcaacctggcggacgggcaaaccctgtacatcggctccggagcaatcctttccggcaatacttccaacggcgtttccagttccgtgcaagctggccaaaacacccagatcaacgtttatacggacgccaccgcctataccttcatcaatgacggcatctccaccacggccgccgcttccacggctgacgccgctccgctggctgctgaccagaccgtcatgacgaagaccggagcgggaactctcgtttacggcggcacaggaaccaccgatacgttcggaggaacctaccagcagcttgaaggcaacctgatcatcggccatgccaccttcggcgccgttgactccgccaccggaaaagtcggtccgctccagtccattgacggcgccgtaatggggacggacgatactgtttacgacattcggacgggacaggtgaccctggcgaagaattccaccatgaagggagcttccgccactttcggaggcgattctaccttgctgctgagcgacgggtccgtactggacttcggcactcccgccacgttccaggataattcccgcgtaggcatccaggtatccgacgccagcggcaatcccgttccgctcgcccaactccgcaaggggacggaaagcgtgacggtcacgctgaacggcacggacatttccggacgcctgctgaacaacgtatttctgagcaccaccatggctccgggaacggcggaaggcaccaccaccatcacccaggatatgaagggcattgacggccccatgtccggctacaacggcaacgtttacaccgtagcggccgctctggaaaacaaccgtctgaatgtggccgccggttctcccgccgcccagttctatgaaaacctgttccgggccacgagcgcggatgaagcggcccgcatcatccagtccgtcagcggtgaacacgtggtgaacttcacctgggcagccagccgcaccgtgcggaacttcgccgacctggggcgcattcaatccgccgcctccatggcacgccagacggaagacaccgttgaagtagtggacgccaagggttctccgatcgcccgcaagacaatcgccagaggcaacggcaatatctgggtgggcggcatgggaatctgggatgaccaggatgcccgcgacggtgtttccgggtataagtacaatgccggcggttatgccgtaggcattgactacaaagccgctcaaggttccctgatcggcatcgccgccggtcaaagcttcggcagcttcaaggataagacaggcatcggcgccgactacgacgtcgattccttcctggccatgatttatggacgcatgcatcccttcagggacagcaagttcactctggacggctacggcgcctacggacgttcccgtttcaaaggtgattcctacatcatggggtccgccgccaacggcagagcagatacggacaccttcagcggcgccctttacggcacctggacggaacgtttcgcactcggcagggcctttataacaccttacacgggtattgagttcatgacttccgaactcaagggattctctgaaagcggaccttatgggcgcaccttcggccacgcccgggcccagaactggaccattcctgtcggcattacgatcgcccgcgcctaccagacggacggaggcaccaccatcaccccggccttgacggtagccgtatcccaggatgtgagccgcatgaatccgaaatccaatgtcgccggccccctcggaacctggaacgcccgcggcgtcaatgttggtcgcaccgcattccgtttgaatgccggcattgatgtgctcttctccaaccagtggggagcacgcgtctgctaccagttcgagacccgcaacaagctgaccgcccacggtatcaacggcgccctcagctatacgttctaagtaggagagcgctccagcgcatgcttttacttggttatggtaggccctttcccgccccacgcgggaaagggttttccgtatgtttccgcatccgttcttttaattcctctgcggattcccaatccgaagtcaacactaaacgataaaaacgagatgtttatacaaatacatgaacagagtcgtcttataaccagaaactttcctgcgggaaatttaaaaccattatataattcacaattccaattatttatgcataataaagagacgtggatttatttttcgaattgggaatccgttacccgtgcttttttgaagtacctgatcaacatgaaattatctacattctgcatcttatgttgcctttccgcaggtctttcccaggctgccacctacgtctggagcggagcggcagggaacggaatttacggagattccaacaactggacggtcaacggcgcgccgaacggctattatccgcaaagcaatagtgataccgccatcatcggagaaaatgccggaacgatcacctggtccaccgggcattcttatttcggagccactaacacagtccaaatagactccggaagctccctgctttgtacaacggaaataggagatctcaacgttaattctttcacgctgaaaggcaattcccaattgatatttgaatccagcaacgcccttggactgggacgtgatttcacgctgaacttcggcacgtttacggcggaggaacacggttcctgggttgccacggatctccccagcttctggaccaatgggaaaaccgtcaccttcgtcggcacactggatatgaacaacctttccggaagcggaactattgaactcgcttccattaaatcttcccaactgggaggcaatctcaatttggacctgagcggcctggacattaccggcaacaaccaaattcaagcggatgtaacacaggtcacggaaaacgacatcatcaaggtgttgattaactacgaaaccgttccggaacccgcaacggccacgctgagcctcctgggactgggcggtctgctgttaagaagaaagagacagtagcctcttccgcatgtctgattccaccccggcttattcctaaaggaaagccggggttttcttttgccgctggcccggtttgcgcacgcctcccttatatcgcaacatttatcctgcggaaccatatagcatccttccagacggaaaaatccgttttccagagcaggtcagaactcgcaattccgcggggtacgggcaaaaggcaggacgtcgcggatgttggtcaccccggtcacgaacatcaacaggcgttcaaacccggccccgaatccggcgtgcggcaccgtgccgtagcggcgcagatccgcataccaccggtacgcttccgcattcatgcccatgctgcgcatgttttcctccagaatatccagccgctcctcacgctggctgccacccacgatctcaccaatgccgggcaccagcacatccatggcggtaacggtctttccgtcttcattcaggcgcatatagaagggtttaatctccttcgggtagttgtacacgatgacggggcatttaaaatgctcctccgtcaggaagcgttcatgttcgctctgcagattgatgccccaggaaacggggtaatcaaatgttttgccgctcttgagcaggatatccacggcttccgtataggaacagcgcacaaacggcgtttccttcacatgctccaggcgttcccgcagccccttgtctacaaaacgggtcaggaattccacttcttccgcgctgtttgccaaggcatcgccgacgagaaaacggacaaactcttccgccatgtccatgtctccatacaggtcgcagaatgccatttcaggctccaccatccagaattccgccgcatggcgcgtagtattggagttctccgcccggaacgtggggccaaaggtataaatgttgctcagggcgcacgcgaacgcttccccttccagctggccgcttaccgtgaggtaggccgccttgccgaagaaatcccgggaggcgtcacgggaagcagcgtctcccacatccaaagtcgtcacgcggaacatttctccggccccttcgcagtcactggcggtaataatgggagtgctgacccaggaaaaatccctttcctggaaaaagcggtggatggcgaaggccagcctgctgcgcatgcggaacacggctccaaacaggttggtgcgggggcgcaaatgggcgatggaacgcagaaactccggcgtatgcccctttttctgcaagggataggaatccggaacagcccccaccagctccagggaagcggcgcgcaattcccatcgctgccttccctgcccggcaaccagagcgccgcggatgctcacggcagaccccgtagccatttctccaatccgttcatagccggggataccctcatccgccacgacctgcagggaggcgacggaggaaccgtcattcacctccagaaaggaaaaagccttggaatcacggcgcgtacgcacccatccctgaatcagtacgtccggcatttcctcctcactgtccaggacatgtttcaccaatgttctgttcatcatggcgcaagtataatacagcgccttgcccatgccagcagaattgcttcaccacggagagaatattacggattttccggcagagaaggaggggatatgccgcacctgttatttggaaggctgcatgacctgccgccccgtcgtaatggcgatggcatccgccagcggcatttccttctccgtatgggcggccccccaggaatctgaaaagataagcgttttcttttcctcgtcaaaaccgataatcagcctcaaatggcctccgcgcgtctgggacaaacgcaacggttccggaacaatgccaagctgcacggaccaaaacacggggatgcccgccatgatatagggcctgatggcattgagccacctgtccacctgggacggtgatccggcacgcgccagcttcaggacttctccgtccgcattgtcccagaaaccggaccagtcatgttcattttccaccttctcttttttcagcttggaggcggcgcggttataggctttcagcagattcctgaaatcacgggaattcgccagggaatccagcactttgatccgtatctggaagcgcgtcccgatttttttcaggttttccgccattgccgccgtattagtgcctccgtccgcagaggtattggccagggaagccagttcatgctgatccacatagtccattccataataggcaaaaatgcgggcggcggtagccaccacgcaataacctttctggccctggtccaccatgggaatatcctgaatcaccacccgctttccttctttcctgacgtgctgcttgatatccgcctttctggcccgggaagaagcatctcccctcgcgatggaatcttccgtgggaccggccttcatccggataaattccgcttcaaactccctgccctcccgcgatgtattgatctccaaggtaatcgccccgttgtcccaaatccaggaccagccgttgactttgactaccgcctccttacgggaggcccggtactccttgggctgaatcccggtaagagcggtcagggattccttgatgagctccaggcgcttgtcaaattcatccttgccaatggccccgttatcccccttgttgtacatcatgacagtcattgactggggggctccgtccttccagttcaccagcatttcccccagggacatgtcccctatcttgatggagggcttcgcaatccggagctgggtcttgcctttatccacccagccgccgggctctccgttaaaatactttccgaacaaatccggctgaggcagcttccagaacgcaccagactttaaatccggcgccatgttgcccgcgccccaagcggagggaagaaggcagcagactgaaaggaaaggcagaatggcagagataaatcgcataacgaaaaaaggggcggggaatagccccgctgctcggaatctacgctggtaatgtattctcccatgacggttctgccaagaaaaaatgaatcttcctccagcgaaccattccttctttatcctctcccatccgtccttttctaataatgctgcccggtaaaaaaaccggcctgccgcagtaaattccgcagcaggccggtttgaatgaataaaccagtccgatgatttacatgaacggacgcaaacgctgcatgatagcgtccttggaagaagctcccaccatcgtatccatgatttccccgtccttgataatcagaagagtggggatagtgcgcacgccataggtggcggccagtccgttgttggcgtccacatccactttgcccactttgatcttaccggccaattccgtagaaagctggtcaataatcggggcgatcatgcggcagggcccgcaccatgtagcccagaaatcgacaagcacaggaatgtcggacttcagaacttcatcctcaaaatttgcttcagaaaatacgtttgccatagtaccgcttagagtatttcaataatcattacgttcacttattcttccgcatcggcgccatcatcggaaggctcttcggcagaagtttcggaagaaacgtcatcgaccgtttcttcatcggcggcgggagcagcggcggcaggcttggagtctccgcccagccagccaaccatgctgcgggcttccaaggtgtccgtagcgtattgataaccgacgaaaataagcgcaaaggcaagagccacaaaggagagaacattcaacagcgtactgggagccgcatccgtatcttcttgaaacttcctggccgtaaaggaggcggaagaaaccggagaggctgcgggtgcggtattcagcccgatggtggcctgcggaagctgtgctgtcgccatgcctgctccgggaggagtcagaggaacagtaggagcggcagcggcaggcgccgcgccagcaggcggaaccacgggggccacaggcgtagtggcggagccgagggcaaccgtctttaatcctccgccaagcttgatgcctccgccaagaccggcgggacgaaggggaatagtgggcgcagcggcggcaggcggagcagcaggtgccgcaggagcggcggctaccggaggaacggcaggagcggcaggagccttgggcacggaaggagcagccggcggagtcggaatgctgggcggaggcggagtaccgcccggaatggagggaggaggtggattactcatatcggaaaaataactgtgctgaacgatagctctcgcttatttcagcccgtaaatcaagaaaaagaatgcgtagaacctgaattccgtgcaattttttttaatttgaagcgtattctatctcaaacacgctgtccggacttgccctgaaaagcgttctttcctacgctgtgtatccggcattatctcatatgaaacccattaccaaactagcttcctccaccctgcccgacggctccgttctcgacctatgggaacgggacggtttccactttcttttgcgcgacggcgtacagacagcgtccagcttttcccacggaagcaatgaagcggcggcagccatggcggcggctccggttaaaagagccaaccagccctccttccttctcgacggcctcagcctgggattcaccctgttcgccctgatggatcaaattcgcagggaaaaggcccgcttcatcgtggcggaaccctgcaaaccgcttatcgactggcacaaggaactgatgaaccaggaacggcccggattcctgcacgatccccgcgtcagcgtggaatttaccccggcgcttcaaatcgcccgcaagaatccgaaaagcttccacgccattctgtcccattccacgcacgaacgcatgaacctgagcgtagccgaagcttccgactattttgccgcactcaagcagggcggtctgctggtcattacggtagcccgcccggacacccgactttcccggacactgcaaaaagcggggttcgaagtaagcacggaagccgttccggcctcacataaaggaaagaaaaccgcttttcacaccgttattcttggaaagaagggacgtttcgtccccttctccgctcaccagtcctgattccatcctattattatgaactgcacatcccttaccatggccggacttctggccgccctgtccctgggaatgccctccctggcggattccattgccccgggcattcttcttcccaaaaaaaataccaaatccatttccttctcccccaaggggacctcggacattttcctgctcggcatcatgccgcagggaagttccgtcaagaaaggggaatccgtagctcaggcggacttccgcatactggacaatagtatcgaagattatgaacgcgccatcaagagcaagaacctggaggtgctgaaactccggtacgccctggaccagcagaaggaacgttccgccctggccctgcaaaaatatcagacggccctgacacggacggaagaggatcaaaaggattttctggaaaaacggaaggcccgcatgctggcggaagaagaggaacgcgtcaacaaagccctgcgccacatgtcctacaaacaggaagagctgaaccagcttaccaagatgtacaaggatgaccaggtggcggaagaaacggaagagatcattttgaaacgcctgaaaaatgaacttggggaaagcgaatttgccgttcagggagccaaactcgttgcggaactggccaagctgcgcaatattcatcgcctgggggaagactatgctacggcagtcaaggaaaagcagatggatctggaacaggcaaggaagcaggcggattttgacctggaacagaaaaagatagccctgacggaggcggaagtctccctgagacgccttcagaataagtacaatgaactgaaagcagaccgggaaatggcctctttcaaggccccggaaaacggcatcctgctgtacggcggatatgtggcggacaagtgggtggccattccggtggcggaaaagctgaaacccggcggcaaactgggagcttttgacaaaatcgccaccatcgttccgccagactcggaactgattgtccaggctactcttccggactccaccgctacgcccaaggtgggggaaaccgtcgtcatcaaaataacgaacatgcagattcccggcgttattacggaagccagccccattccgggagcagacggcaagcgccgcattatcatcacgcccaaggttcccgccagccagattttcgcccccggccttcccgtccaggtgaccatcaaggaccaacaggcctgatttcccttaacggatccccatgaataaagccgtccttttccttgccgcccttggagccagtacggcgctctgcgctcctgttccggcggaaaaaacggaaaaaagggataccattcccattgccagggttccggatgttccgcctccctcccgggaaacgctggacgcttctatccggaaggcggctgactttctgttgaaagaacagaacagggacggttcctggggaaaccatacgcgcaccaagggtctgaatgttctctgcccttatccggaaggccccagatcattcaggacagcctccacctctttgtgcgtgatcggcctcctgaccagccccctgaaagaagaccccgccgtcaaggcatccctggacaaggcgctgcagtacctgctaaccacgctgcccaccctgaaacggggagacactcgtaccgtgcttggcgtatggggccatgcctacggcctctccgccctgagccgggcggcgcggaaccttcctgcggatgcccctttgcgcgaagaactcaaaaaggtggcctccctccaagtcaaagcgctggaccagatggcggacgtccagggcggctggggctattacacatttgaaactttttccaagcgtcccattggggaacccacttccttcctgacggctacagtccttcttgcctacaaggacgcggaacaggccttcggcctcaaagcggaaccccgcgtcgtcaaacgcgccgtcgcctgcctggaaaaactgaggacgcccgccggcagctacgtctattccctttcccattccttttatcccggcaggcccatcaaccgtcacaccggcagcctggcccgcactcccgccggggatctggctctgatgcggtatgacccgtcctttatttccaggagtcagctggaagacggcctggaacgcatctggagccgcggcggctggctttcgctggctgtaaagaagcccattccccatgaaagctttgcccagaacgcgggctattttttctattacgggtattattacgccgcccgctgcctggaggaagtggcgccggaacacctggcgcgccatgcggcccatctggcaagcgacctcctgcccatgcaggaagaagacgggtcctggtgggattaccccctgtacaattaccacaaattctacggcaccggatatgccttatatgccgtctcccgcgtcagagaatccctgtatccctctgatgcggcaacaacttcatgacccatgttccgcccgctgacgaccatttttctcgccaccttgtgcctgcatcttcccgcagcgcagggggaatccgtgccaaaggaaaaaacggatgttattccaatcgccaaaatcccggatatttcccccgcaaaacccggacaatttgacagggcattccgccgcggcgtggatttcctgctgaaaacgcaaaataaggacggctcctggggcgaccaccgggtaatcggcacctggaatatcctctgcccctacccggacgggcccctcaccttcaaaacagccagtaccgccctgtgcattgcagggctcaacgccagccccctgcatcatgaacccgccgtgcaggaagccatgacccgtgctgaagactatctaatccgtacgatgcaccatctgaaacgcggcgacgctctgtgcgtttacaacacctgggcgcatacttacgtgctggatgccatgagcatgagggctgcaagactggccccggacagccttcgctaccgggaactgaaggaatgcgcccgctcccaggtaaaaaaacttaatgaactggcttccgccatggggggctggggctacctcacttattccggcttcagcaaacgccctgcggcccagcctacctctttcctgacgggaaccgtccttatctccgcctggatggcaggaaaatcattcggcctttcccttgatgataagatattcacccgcgcgctgaaattcctcaaatcccagaggacgcctgtgggaacctatgtttattccctttcccattccttctatcccggcaggcccatcaaccgccataccggcagcctggcccggactcccgcctgtgattacgccatcaggctctgggaaccggaggacatctccctgcgccagcttgtggacggcctggaccgcctgtggagccgcaggggatggctgacgatggccctgcataaaccaactccccacgagagtttcgcccagaattccggctattttttctattacggatactattattcaggaatgtgcctggacatgctggcgccaaaccaggtaaagcgtcatgcatccctgttggcggacgatattctcacccgccagggaacagacggggcctggtgggactaccccctgtataattaccacaaattctacggcaccggatatgccctgtacgctctttcccgcgcctgggacaagctgtacggccaaccggaaccttctccatcctctatttccacactatcccggccatgataaataccatgaaatcgcttttggcgctctgcctgttttacagtgcggcttccgtctccaccgcagaaaccccaattaaacatacttccttcagacccggagaaatctggacggacaacaacggcgcgcacatcaacgcccacggcggcggcatcctgtacgacaagggaacctattactggtacggagaacacaaggtggagggggacgcaggaaactatgcccaggtaggggttcactgctattcctccaaagacctctataactggaaggacgaaggaatcgccctgaaggtggtggagggggaccattcccaccccatcgccaagggctgcatcctggaacgccccaaagtggtttacaacaaaaagaccggaaagtacgtgatgtggttccacctggaactcaaggggaaaggatatggatccgcttacgcgggggtggcaacggcagcaaaacccacagggccattcaagttcctgaaggccgggcgagtcaatccgggcaaatggcccctgaacatggataaaaaggatcagacgaccgaattcaccaaggaaatgcccgactacgtccgcatcatccgcagggactatcccggcgggcagatgagccgggacatgaccatttttgtggacgacaatggaaaagcctaccacatctattcctcggaaggcaatatcacccttcacatcgcggagctgacgccggattacacggggcatacgggaaaatatgtccgggcgttcatcaaccgctacatggaagctcctgctatttgcaaacacaagggcaaatactatcttatcgcttccggatgcacgggctgggctcccaacgccgcccgcagcgccgtggccaaaaacatcgccggcccatggatggaattgaaaaatccctgcgtggggcccaaggcaggcatcacgttcggcggccagagcactttcatcctgcctgtacagggcaaacccggaaaattcatcttcatggcggacatctggcgacccaaaaacgccattgacggccgttacctgtggctgcccatgaaatgggagggtgaccagattatcctggaatggaaggatgaatggacgctggatgacctgtaaattcatctccttcctttttatgcaggatacggtttattgcttccatctccttgccggaaggcagaagcggagccttctgtatgccttgtgctccgctctccttgttgcagcagtctggctgcttcatccggaatggcctttctgggcgggctacattgcctgggcactcgcttacgcggcaacgctgattgttcaacacaccattcccctttccatccgctgcccgcactgcggaaacgccgggctttattctgctccgcaaactccggaagaacaaagaaggccggatacaggcatcatgctggaatgccggggttgcggttccaccttttacacggacgcctatttgccctggccgggaaaaattatccgccggcgccccacttgcccggaagaatgggaagaaaaatctgcccgtaaacaagccgggcccgcttcctccggagaggaacgcaggccggaaaggtctttcgtcaacggaggaaaaatctaacggacttttttggaagccatcacgtaattcctcatgcgctggtctgcgggggtggtggggcgcacgctggtaacccaattgccgtccttatccttctttttgatttccgttctgtcgcggtacaatttcgcggagaaatcgctggaatcaagaacaaccggccccgaacctgtcgtgacaatgggagtgggaggaacctccgcaaccaccgtcattggagcggcaagggaattataccagtacaccagttcctgctggccgacaggatcgtccggataaggagcataagctccgttattggtggaaacctttacataggccggttccggaaatgtggtctgataggaagagggggaacaggcccccaacaacaaaaggccggctccgccggcaataatcatggaatgcagtttcatataggcattggactctcttccgccacctgccgttcagaggatgtacggttccggaatattacgggcacccgcgcgtcttgcgcttgagcgccattcccagcgccgtacgccatcatgcggaggaaaggagcttgccgtccccccggcggcatggttgaatattatttcctctccatgattacggatttccggctgaaagtgtttgaaaccgtcgcacggcgcctgaattttacgcgcgcggcggaagaactgttcatcacgcagccggccgtcacccggcatatcaaggaactggaacgtctgctggatgcccgtctgttcaaaagggagggacgagggattgccctgacggcggaaggcgtgcgcctgctggcccattcccgccgcatcctcaaggaatacgaaacgctggctgaagaaatatcctttggccgcaattcccctgtttccggcgaattgagcctgggagccagctccaccatgtcccagtatgtgctgcctccgctgctggccctgttcaaccgccattacccggaaatacgcatatggctgaaaagcggcaatacggaggaaatagaacaggccgtccaggatgaatccgtgcagcttggcatcgtggaaggcacggcaacgcgcgcggacctgcattaccagccatttatggaggacgaaattattctggcaggaggcatgcaggccgccgtgcccagtgaagggctttccctcccgcaactctcccatgtgcccctgatcatgcgtgaaccggggtccggcacgcgtcgggtggtggaggaagcgctgaaaaaacacgggatctccgtttccggcctccatgttctgatgatgctgggcaatacggaaagcatcaaaatgtatctggagcattctccggcgtgctcttttctctcctcccttgctgtccggggagaattcaaacgcggaagtttgaagaaaatacatctccgccacctggaaattcgccgcaccttccacttcgtctcaggacatggagaccacagcagaatcaatgaactgttcatcaagttctgccgatattattataacaaaatttaattggctataacaatttttaattagattttataatggctgcatcgtatattattccgcagccaatccggtacgctcccggccagatacaacgggcagccgcaaccatcatttaccgaccatgtctcccaaatatctagccaatcccctccacggcatcctgcttattgttctgttttccttttccgctttttacattgctgattttgaatgggtgaaacatctttccctcagcccgctgatcgtcggcatcgtgctgggaatgctttacgccaacagcctgcgcaaccaccttccggaaacatgggttcccggcattcagttctgcaccaagcaggttttgagaacaggcattgtcctgtacggattcaaactgacttttcaaagtgtcatcgacatcggcggctccgccctggcgctcgaccttattgtggtcactctcaccattcttctgggagccgggctggggcgcctgctgaaaatggacagggacacggccctgctgacctccatcggcagttccatttgcggggcagcagccgttctgggggcggaacccgtcgtcaaaagcaaaccttacaaagccgctgtggccgtttccaccgtggtcatcttcggcacgctctccatgtttctgtatccagccctgcaccgggccggaatactggatctgacgccggaacaaatggggctttttaccggagccacccttcatgaagtggcgcatgtggtgggcgccggcaacgccatggggcaagctatttccgatccggccattatcgtcaaaatgatccgggtaatgatgctggccccggtgctggtcgtcctgagcattgtcctggcccggagggatccctcttccggcgcaaacggggaaaaacggaaaattaccattccctggttcgccttcctgttccttgccgtcattggctttaattccctgcacctgctgcctgccggacttgtggacgccataaacaccctggatacattcctgctgaccatggcgatgacggccctgggcgcggaatccagctttgagaagtttaagaaagccggagcgcggcctttcctgcttgcaggcttcctgtatatctggcttttcttcggaggttactggctggtcaagctgatcagcctctaaattccaaaaacattcctcctgcggaaagagggcaaggcctacgccctgcctttccgaacaggagaaaaaagccgtttcaccgtcagaacgtgagaaccgtttcagcacaggttctccgcctcgttccatcctgatttcctgccagaaaatccggttgaaaaggatcaccggaggaaccatgccggcatgggatgacggaacatgcggagcgccgcatcctgcccgcattactcccaactggccacctgtgccgcccaatacagacatcctctctttgctttctccgctgctgcggcaggttttcccggtaaggctcaacaaaaattcatagtcaaaccgtttggagacgctatagtatgcgtacccagttcttaaaaacaaatggcaaccaaattattcattcccggacccactgaagtagcacctgaagtacttgccgccatgagcggcccaatgatgggacaccgatccaaagcggcctccgccctgcagcgccgcatttccaacaatctgcgccgcatcctgctgacggaacaggaaattctgctttccacttcctccggtacgggcctgatggaaggcgccgtgcgttcctgcaccgccaaacgcgccgccattttttccgtgggcgccttcggcgacaaatggtacaagatcgctacgggcaacggcgtgccctccgatattttcaagagcgaactggggcagcccactaccccggaaatggtggacgccgccctctccaccggcaaatacgacaccatttgcatcacgcacaatgagacgtccaccggcatccagaacccggtggaggaaattgcggaagtgcttaaaaaatacccggatgtcgtgtggtgcatggacgccgtgagttccgccgccggctcccggattgaaacggacaagctgggcgtggacgtactggtgacctccacccagaaggcgcttgccctgcctcccggcatggctgtctgcacgctatcccaaaaagcgtacgaacgcaccgcctccgttcccaaccgcggctgctactttgacctgcgttccatttacgacaccatccagaagaaggactaccagtacacgaacactccctgtgtctccatcatgtacgccatggacctccagctccagcgcatcatgcaggaaggtgtggaaaaccgctttgcgcgtcatgaagccatggccgaattcgtgcgttcctgggcagatgaatatttcagcgtctttgccaaccgggaccacctttcccgcaccctgacggtgatcagcaacacgagggacattgacatcgccgccctgaacaactccctgattgaacgcggcatgcagctcggcaacggttacggggacttgaagaacaaaacgttccgcattgcccacatgggcgagctgacaatggatgacatgcgctccatcacgtccagcatcgtggatatcctgaagctcaaataagcgaggcccctgccctcttttccggctccgtccggaaaagagggcggaacgcctccgccggaacatgaacggaacaatcgccgggaacaggatacatctcgaatatcccagaacttgttcatctttgatcttttccgcatcccggcgacattcgtcatcgtccaaactttcaatcaggcacggtctttccgggacaacccgttctttcaggactccatttcacgttatttgctgctgttcattgcggcatgcattttggccgggcttgtttccagcattcgcgcgctatatcatctttcccattactgactttccgaacttttccttccatgtccactctccatcccttccccgccctgcgccctccccgggaactggccgcgcgggtctcctccctcccctatgatgtcatgaaccaccgggaagccaaggaaatggccgccggaaatgacgcctctttcctccatatctgccgttccgacatcgacacgagcgaagccgccatccatgccccggaaacctacgccaaggccagggaaaacctggaaaggtttgtccgcgaagggtacctcttccgggatgaacggccgtctttctacatctaccgacaaatcatgtgggggcgcgtacagacgggcatcgtcggctgcgcctccgtggatgaatatgccagcggcgccattaaaaagcacgaactgacccgcagggaaaaggaacttgaccggattgagcattttgacgcctgctccgctcagacggaaccggtattcctggcctaccgcaaacatgaaggtctttccgccatcatccgggaatggattaaattccacaaacccgaatatgattttaccacggaggacggcgtcacccatatcctgtggcccgtttccgagcccggcacggtggaagacatccgcaaaagctttgaggaagtggacgccctttacattgcggacggacaccaccgcacggcttccagcgccgccgtttccgccaggcgccgccagaaacacccggactacacggggcaggaagaattcaactacctgatggctgtcgtcttttgtgatgaagaccttttcatcatggactacaaccgcgtcatacgcgacctgaacggcctgactgaagaggaattcatggaaaaactccgtacctcctttgacataaatcctgtggataccattcccggagaaggctacgccccccgcgccaagcatgagttcggcatgtatctgaatggacgctggtattccgccacggccaaaccgggaaccttcccggccggccatcccatcgaaagcctggactgcgccatcctccaggcgaatgtgctggctcccattctgggcattgacgatccacgcacgagcgaccgcatcgacttcgtaggaggaatccgcggtctgggagaactggaacgccgctgttccggggaaatggcgctggctttctccctgtatcccgtcaccatggccgaccttttccgcgtagcggacgccggagaaatcatgcctcccaaatccacctggtttgaacccaagctgcgcagcgggctttttatccataccattgaacaataatcttttccaccgtaccaacatgaacaaggtccttattcctaccaaactctccgacgtagcggccaacacgcttaaaacggccggctatgaagtcatccaggacgctgatacgcctctggaaaaacaggtagccgcccatccggatgccgtggctctgatcgtccgcagcgaaaaagtcactccggaaatcatggacgcccttccttccctgaagctggtcgtccgcgccggagccggttacgacaacattgacattgtgtacgcccgcaaaaaaaacgtggacgtcatgaatacccccggggccaactccaatgctgtggcggaagaagtcatggccatgattctggcctactaccgccacatcgtccaggcggacgccaccacccgggaaggcctgtgggaaaagaaaaaatacatgggcagcgagctgaccaaaaagacggtgggcatcatcggcctgggcaacatcggccgcaacctcgtcaagcgtctgcagggatttgaacccattctgctgggctacgaccactttctggcacgccagcgcgccctgaacatcggcgtcacccctaccagcattgaagatattttctcccagtgcgacattattaccctgcacgttccgggcggcccctccacccaccacatggtgaacgcggagctcattggaaaaatgaaagacggagcagtgctcatcaactgctcccgctacggcgtggtggatgaagaagcgctggccgccgccaaggccgcaggcaaaaacatcggctacctgacggacgtacatcccaaggacgcgcccggagagaagccttccgcccccattgcggatttgattcttccccacctgggagccaacacccgggaggccaatacgaaagcggccaaacgcgccgcagaacagatgatcgcctacttttccgacggcgacacctcctgcgtggtgaacggggaatcccccagcggcctcaatccggcccatcttcaactggcgtttctgctcgcctccctggcgcgcaaggccggcggcaacaagcccatccgccgcgtggaatgcactttttacggcaacctgcgcatttttcgcaaatggtttacggcccccattctggaaggccttctgccgcatgcggaaaaagggctcatgcctgccgccgcggaagaatccctgcgggagcacggcatcgttttcaaagcgagggaacccaaagacgacaaaccttatgaagattccatcacgctggacgtggccatggaagaggaagaggaatatttccacaccagcgtgcgcggcgtggtgacggaaggcatccccatggtctcccgcctgaacaatttcaacggattgtacgcggacctgcgcggcacgacattatgcctgcgctacaaggaccgcccgggtattatcgccctcatcggctccgccctgtcttccaatggaatcaacattgacaacatcgccgccccggccgaccacgccaccagggaggccctgaccgtgattaagaccaaccagccggtttccgatgaactgctggataaaatcgcgaaagagatagatgccatctctgcgttttccctgaatctttaacagggaaagacgcatttccggaaacctgcttttcagaccgcccgcttccttcatctccggagggaagcgggcggttcttatttctgccatgttgacaaggcttacccatttttatatcattgaccgaatcgtcggaacatatccatgcgctacgtactgcttctcctgaccttgttaaccgccggattttccgtctggtactatcaaaaccgcatttccccggaaggaaaggaactggccgcccaaaaaacaacattggaacaggaggccgcaatattggaaaaagccgttatccaatcccgaaagaagctggatgatgcccaggatgccacccgggcggcggaagaagacatagagagattccagcaagcttatctccaacaaaaaaggcaacagcatcaggaaatccaggatgccgcctaccaaaaaagcgtggcggaccagcaggaagaagtgaaggaacacgaccaaaagattgaccggctgcgccgccgcatgaaaaggcaaagggaaagcaccaaatccgccagggaggaactgctccggaaaaaggagggaatgagaacccagcttgacaggctgaccgatcagcagaggagcattcaggcggaactggaacaggcggaacgcgaactggcccaaaaacgggaagaggccaaaagcaggaagaaattgtccgggattgcccctcagaagggaaatatttccgaacttcaggcacagatgaaccttatccgccagaaaaccgcagctgctaaggaaaaaatgaaagccgtagatgcggcgctggaaactctggaagaaaagtctggcaaacaggaacgcctgatgcagaaggcggaggagaaactcaccgaacagaaaaacaaggttctggccgacgatgaccgggacgaatccgctgtcccggaaccgggcgatgaagacttgctggcgtctgccgaatacagggagctgtccggagatgtacggaaaactctggaacaggcccgtaaaaaagaagaacaggcatcccgggcctatgacgaagcccgcgcggccatgcggaaagcttccagggaagaagtgaaaaagctggcaaagaaggaaaaagaccatgcctcctttcagaagctgttcacgggtgcagcctccgtcgcgggatttatcctgctcctgttcacgggtgcggccttccgcagcagcaacagttgaacatctgccggaaaatgaaatgcacggagaacaaggaagcacccgccttccctcagggagtcgttgacggacggcagggatatgatagtctcaggccagcctgatcatgctcacactggcccagattcacggacaaccggaaattttccattccattcagggggaaggagtctcccagggaacaccctgcgttttcctgcgtctggcaggctgcaatctggcctgttcctggtgtgatacggcgtattcctggaacggaacggttcccggaatgcgcctcgcgcctgaaaaggcggctgaactggtgctccattatccatgccgccgcctggtcctgaccggaggggagccgctcattcagcaaaaggcgcttcccgccctgctgcgcctgttgccggatcatgccgtggaaatggaaaccaacggcaccatcatgccggatacggaactgctgaaacgcgtcacgcaattcaacgtatctcccaaactcccccattcaggcaataacgacgttaagacttggaaaccggatatcctgcgctgtctggcgggtacggagaaagcctggttcaaattcgtcgtggcgtgcgaggacgatgtcagggccgttctgcggcgggcttccgaagcggacattcccccggaacgaattctgatcatgcccctggcctccacacgggatgagttgaacgccatgcgtgcgcaggcggtggaatggtgtctccgctacggttttcgtttttcagaccgtctgcatatcgccatctggaacagcaaaaaaggcgtttaagcacgctcctgactcatcaggaaagacaaatgcttcccgcttttccggccggaattccgcaagcctccaaggctctgcgccatcggggaacctacgctttctgtttcaaatccagcagcatctgggtattgctggggtatttgttcaggaaaaacaggaaccgttccatggcttctacgggtttatgcccggctaaagcgcggcggatcagattcatcttgtacagccatgcttccggcataatgagctcttccctccgcgtccccgatttcagaatgtccacggccgggaagatatattgctccgcaatgcggcggttcagcaccagttccatattgcccgtccccttgaattcctggaaaatcaggtcatccatgcggctgttggtttccaccagggcggtggcaatgatagtcagggaaccggcctggcgcgtattgcgggcggcggcaaaaaggcgccggggcatttccagagcgcgggcatcaatgccgccggacatcgtgcggccgcttcccttgtcagcgttattgtaggcgcgggccaggcgagtaatggaatccatcagcaggaaaacatgctgccccgcctctacaagccgtttggcgcgttcaatgcaaagttccgccatgcggcagtgatcgcgcacccttccatcattggaagaggcgtatacttcagctccggggagggaacgtttaaactccgtcacttcttccggacgctcgtctaccagaagcaccatcaggtgaatggaatccctgtaattctccagaatggcttccgccatgtgctgaagcagcgtcgtcttccctgcgcggggcggagagacaatcaggccgcgctggccgcgcccgattggagcaatcagatccaatgtgcgggtggtgtaacgctccggccgggtttcaaaagaaatgcgcttattaggattgaccgccttgagctcttcaaagtgcgggttcttgcgcgctttctctggagcaaccccgttaacggaggcaatttccgtcagaagaatgccgcggtcatgacggcaggcctgcccatgcacccacacggcaggacgcagaccgaacctgcggatcatatcctgcggcacataaacggcttccgcaaaagcgtcaaaatcattatccggcttccttaaaaagccgaaccccttattcgtaatttccagcaacccgtccaccggttccggcggcgccagttcacggggggcgctgttctgtggggttccgccctcctgattattattccagcggtttttaacccggtcattgccgtttctgccattgcggccatcctggcggttattccggtttttattgaaacggtcgttgttattccggcggttctgcctgtcaaaacgctgcctttgcggctcatttgtccgacgcggctcccgggcggcatcttcggaaaaatccgccgcaccttcctgcaccaccttgatggacggaacggaagcatccgcctccggctcctgttccctcggtttcctcacaaatctctggcgaataaccttcggcctgccttctgcgggctgctccggaacagaatcggaagaatcggaagccggctcggcaggcgccgcatgaacggcaatttccgcctcagggccggctgaatcaccgttctccggagcaacagccttggcagcacgcctgcgcaccggcttgacggcggcttccgttccggaggcaatcgtagagccgtcagtttccggaacctcctccacaggcttcttgcgcgggcgtccgcgccggggcctggcaggaacatcctgcgcttcttccaccgggatttcagcactgctcttacgggaagtcttcttccccggcatatcgacactttccatcccatcatccgccaattcagcaaccttcttccttatcgtccgcttgcggggagccggggaagaatcctgttccgtcccgggcacttccgcagcagtctggggctttaccggagcttccgccgcagacttggttttgcggataatacgttttttgggcgccggctccggagaaacctgttccggagtcaaatctgggggggtatcagacatggaaaagaaaattgaactgcaacaacaggcgtctcctgaaggacaacagcgttaaccaagctgctcaaggatttcttccgctacatcgaaattggagaagacgttcagcgcatcatcatagtcgtccagcgcttcatacaggcgcagggcggccttcgccgtttccagatcattaatcacggaagcattctgcgccacagaaatcagcttcatggaaattaccgtatgcccggcttcacgcagggcggcgcacacgttgttcaactccgttgggctcgtaacaaacacccattcattgtcggaatccccctgttccacatcatccgcgccgcattccagcgccagatccatggcggaatcctccgtaagaccttccgccatgatgcgggcctctcccttgcgttcaaactggtaagccacggaaccgggcgtaccgatgctgcctccgtttttggtgaacagggtacgcagctcggaagcggaacggtttgtgttgtccgtcgccacttcaatcaggaaagccgtgcctgaggggccgtagccttcataggtaatctcctggatggtagctcctcccagttccccggtgccttttttgatggcgcgttcaatattttccttgggggtggacacggccttggctccgtcaatggcggcgcgcaggcgcggattcagatcaggatctccgccgccgcttttggcggccagcatgatttcatgggcaaagcgggcaaaaaccttgcccttcttggcgtcttccttagccttaacgtacttgatcttagaccatttattatgtcctgacatagaattgggaataatagtaagtgtaggtgaaaagagacaaactaacaagtggaactgttctacaacccggggaacacattgtcatttgcaaataccacgcaggaagggaatcagggtgcggccatccgtaaatatattacaggtaccggatactctgccggggaacacgccgcgcaccttcaggagctccggctacctcttggcagtcactctcaacacacgcaaaataacgtattccccagcattggcaatacttttttaggtcacggcaaccggctgctttcagagttatcttctaccgccttcaattaatttttaatatattttgattatttaaaataataaatactgtttctttaatagtgaaaataaaaaaatatatccgcacagcaggctcctgttacacatccagccctgatggtgcagggggtgattccgtcatgggccaaagcctgagttctaacgccgcctctgttatcattgactaagaaagggaggcgggcttagatatgcccttctttctttttccctgtcttatggaacaagcagcgcaccaggaaaaatcacatgcggccctttcctccgtcctgtggtccgcctttttaacggtcatcaagctctgggccggcattgtaaccggcagcctcggcatcatttccgaagccctgcacagcgggctggacctgatggctgcggccatgactttttacgccgtaaaagtggcgtcccgccctgcggacgaaagccacccctacgggcacgaaaaggtggagaatctttccgccctggcggaaacagccctccttttagttacctgcgcctggattgtctgggaggctgtggaccgtctgttctacaatgaggcggagattaccctcacctggtgggcttttgccgtagtggccgtctccctgctggtagatgtgaaccgttccgccatgctccgccggatagccaaaaagcacaaaagccaggccctggaagcggatgcacttcactttaccacggatatctggtcttccgcagtcgtgctcctgggtcttttctgcatctggctggcccatctggtccctgcggaatcagcctggcacggcctcctggagagggcggatgccattgcggccctgtttgtggcggctctggtttgttccgtggctttcggccttgccaaacgttccatccacgccctgatggacggcggttcttcctccctgacgcggcaggtgctggacgccatgaaaaagaatgccccggattatccggtcaaacgcatccgcctgcgtgacggaggctcgcgcatcttcgtagagctggatgtggaagcgcctgcggaactgcacgtggatgacgcccatgatgtggcggaatccattgaaggcattgtaaagcatgaattgccggaagcggacgtcatcgtccatatcgaaccggcgcgggagaatctttccaatatggagccggacatgattatccaccggctggccttgcgccaccatgtccgcattcacggtttttatgcaggccacggcaaacaggccccctgttatttcatggatgtggaaattccggcggattggcccttggaacgcggctaccatgtggtggaggctttcagggattccattctgcatgaactcaagccggaaaaggtaatttgccgcattgaaccggattgccgcgacatggaaacaggcgccattgcggaacaggtttctccggaggaagtgcgcctgaaggtaaatctcattctccagcagcacagaaacatccgcaagatcctcaagctggacctgaccagggaggccaatttcccaaccttgacctgcgtgtgttccgtggacgcctccctgactatccgggaatgccaccagatcgcctcgcagctggaaaaccagatagaaaacgcactgcaccacctggggcgcgttaccgtcattcttaaaccgtccaagcagaacagaaattgaatgactgttgccggattcccgtaaaaacatgttccgaattcgggaaggagaaacggtttccattccgggcatgggaacctctgcccggacaaagcggagccaacgattatgaatggcccgcaacggaaactccgggcatttccctgtccagctccgcgcgaatgcgctggcgctcggaaacgatctgttcgtcgtccgcaccgccttcccgcaggaaatattccgccatggacagggctacttccgattccgaggaaaaaacctgggaagcgccggcttccttcagtatatccacgtccctcatgtacttggtgtgaatcatcacgtcaatatgagggttaagctccagagccacgcctactatctccttggcgtccggaatggaagcggagagaatcaggctttccgcatattcaatgcccgcatggcgcagaatttcccgctggctggcatccccgtaaacaatatcccctccctgctcccgtatagcggtaaccgtgtctatgttcatttccacgatgatgacttccaccccgttgtcattcaatatcctcttaagaatgcgccccgtggggccaaaccctaccaataccacgcgccgcgcatccggagcgggcaaggccatgctgttcacgccccccgggtccgcaagccctatgccgcgtttttgcagccatttgactgcaggtccaatctgccgatacaggatgggatttaaggaaatggagacgacagccgccagaatgatggcctgattggcatccggaggcaggatgttgtacatgagacctattccggcgagaatgaaagaaaattcacccacttgagccaaggccacggatacgctcagcgccagcggcaccggccgcctcaggcaacgaacaaccacataagccgccagcggcttgccgatcatcaccacccccagcgttgccagggccagaggccagcaatcccccacggacatcgggtcaaacatcatccccacggaaacgaagaagagaaccgcaaaagcatccctcatcaacatggcttccgccgccgcgcgcgcgcagaagtccgactggcctacaaccatccccgccaaaaacgcccccaaaaccatggaagcgccaaagaattccgcggagtacaccgccacgcccagcgcaatgaccagcacagccagcgtaaacaagtcacgcgcgcccgttcgggccacgtaccgcagcaccagcggaatgacttttttcccggcaaacagcgtcagggccaccagcagggccagcttgacgaacatccagccaagctcggaaagaatgccgccccagtctccggcgccgctctggcgcgcttccatcacggcggggatgagaaccagcagcagaatggtaaacaggtcttccactaccagccatcccagagccacatggccgccgggcgtatggaggttctggttgtcttccagcacccgcgtcagcactacggtactcgccacggaaatcgccatgccaaaaaccagtccggaaatcgcggaccatccgaacatccacccgaccagcacccccagcacggtagccacggatatctgcacaacggctcccggcacggccactttttgcacggcaatcaaatccttcaaatggaaatggagccccaccccgaacatcagcaggataacgcccagctccgcgaattgttccaccgtatgggaatccgcaacaaatcccggcgagtacggccctaccgccaccccggccagcaggtagcccaccagcggggataaatgcagttttctggcaataaggccgaaaagaagggcagcggccaatccgccgacaaaagtgagaataaggctgaaatcgtgatccatacgcgcgtgacagggataaggggtattcttgaccgccaagtcgttttcacgctatcgcgttttattttccctcacaagaacgcattgcgccgcatggaaatgcagtcgcactttttgcatgaaaaatggtcccggcaaattttcatcataccctatttgcgaccgcttctaattaaattttcccatacgggattcctatcaaatgtgttagtaaaattcgtcctgttcattcccgggaagctgccgggtcattgtcccgcactggcggtcggacaaatacccatacatcaccatcggcaatttttacatcctgctgccggacaacggaaataatccgccggcccggaaaatccaaagcaggaacgcccgccgggcagactcttttgttcttaggctcttccatgctccacgtccatactcctgaacttggaaaaattgataaaattcccccaattccatttgaatttccctaaaattaatttattttatattggaaataattgattttttcaaatctatgaccgaagatgccatattcaaggaacagtggagccttcttaagaaggaaatggcaatgggagacgcccatctccagcaaaggctggaacagttcattttccgccaatacggccgggcggtcctggcgcattatatcaaagccctttcagccctggaactcagccgccatttctacctgcggttccgcaggaggagccgttccgtcacggagcccattctctactggaccgtgcttgcggaaacaaccatccacatgacgctggaaggggtaaaagacatgcaccccttcatctcccttccggcatgtgccggcgcaaccttccagctcgacatgttgaaagactgctaccttctttatttgagggaccgggaatatccctgctggccgcgggcttcccgcagaagacgcatcatccggaataaatggaacgctccggagctggaagcctcctatttcccccggttgtgccggaacagcacggaccgccattatgccaacatgatgcatattctgctggaagaaatactgcatgccttgattaccctccgccaactcaggaaccacggaaggagcctgctggaattcagaagaagacagcacccccattcttctccgggcggcgttccgccgccatccctccgtccgcagcccccttcgtaaaacaggctttaaaacatccgcgctttttccaaaagatatttgaaaaaccgccgggatgttacagaatcagcatgcagtctccgtaggaaaaaaatctgtaccgttcccggatagcttccagataggctttcatgatcagttccttgcccgcgaaagcgctgacaagcatcagcagcgtgctctgcggcaaatggaaattcgtgatcagggcgtccaccaccttgtagttatagggaggatagatgaagatgttcgttgaaccggcgcactccctcaacggcagaccctccgccgtcgccacatgttccagcacccgcacgctggtggtgcctacggcaatgacccttctggcgttattgaccgcccgggcggcggcttcaggaagaaaaaaatgctccgtgtgcatctgatggtcttcaatcctgtccgccttgacgggacggaatgttcccacgcccacgtgcagggtcaaaaaatcatgaggtacggacgccagcagctccggcgtgaaatgcagcccggccgtaggggcggcaatggccccttcatgtctggcgtaaacggtctggtaacgctccctgtcggatgggttgctttcccggttcatatagtggggaagagccagacgcccgtatttttcctcatccacttcccggtcaaaccggataaggcggtacccttcctcatcaatgccttccacggtgcccaccgcctctccgaccgcaaccgtacgcccaagcttcattttgcgtccggggcgcaccatgcacttccacaacaggggattaagaacctccgcgcgtactatttcaatggaaccgtcgttggaaaaatatcttgccggaaccaccctggtatcattcaggataaaatgatccccttcccgcacatattccggcaaatcgcaaaaatgcctgtgctcaatcatgcccgtatcccggtgaatgaccatcatccgggacgcggagcggtccggaaggggacggtccgctatcagttcttccggcagcggataatcaaaatcaatggtgcgcacggccaagtgcattgccacgaatcctccgaaaggtcaatatctttaaaccgcaggtaacacaattatatctttaccctgcttcggttcatatggtatggaaggatacatgaacaacctgctgtcagcaaacatttccaacgcaaccgcctgggggaccattctggtcgtcgtcctcgtcatctttctggtcatctttttcgccatcatcgccaaattcttcaagacatggctgcgcgcccgtctggcgaaagcgcccgtctccatgagcaacatgctggggatgtggctccggaaagtgccctatcccctggtggtggacacccgcattacggccgccaaggcgggcctggacatcagcacggatgagctggaggcccacttcctggccggcggcgacatcgtggactgcgtgcttgccctgattgcggcggagaaagccggcattccgctgagctacgaccgcgcctgcgccattgacctggccgtgaaaggcacttccaagaccgtgctggaagccgtgcgcacctccatcaatccccgagtcatcgactgcccgaaccccagctccggccaaacgcgcctgacggcggtggcccgtgacggcattgcagtggcggtgcgcgcccgcgtaacggtgcgcaccaacctggatctcttcgtagggggcgccacggaggaaacggtggtcgcccgcgtcggggaaggcatcgtctccgccgtaggttccgccccctcctacaaggatgttctggaaaaaccggaggtgatctcccgtaccgtaagcgacaagggggtggacgccgccacggcgtttgaagtgctttccattgacattgcggatgtggatgtagccggcaatgtgggcgcccgcctccaggccgagcaggcggaagcggacaaacaaatcgcccaggccaaagcggaagtccgccgcgccgccgccgtagccacggaacaggaaatggctgcaaaaacgcaggaaatgcgcgccaaggtggtggaagcggaagcccagattcccatggccatggcggaagccttccgcaacggcaatctgggagtgctggactacgcccgttaccaaaacgtggtggctgacaccaaaatgagagattccatcgctcaaccggatacgcctccctcttccatcaaataaataaattccctggtttccggaaaggcctgctttttccggaaacctttatcctttatggattcactggcatacatgctcgcctccggaggcgatgacaatagcctgaaactctggttctggctgattgtcggggtgattttcctcatcaaaaaagcaatcgaattgttgaaaccggatgaaaaagatgaggaaccgtccgttccggacacggagaaccatcatgaaaaacgcgtaagggaagtcattgcggaaatgcgccgggcaaccccgcagccacagcaaacccaacctgccgcaccggcccgcgcaccgcggccctcagcccctcctgtagagcttccctcccccgccgtggcccgcaaaccgcagccgatcccggcgccggcggctgcacaacccgaggaaacagcccggcagacggcgcaaaatgtgctggaacgctacgtaaaagctacggaagaagcccggcaatccatgcgctctctttccgatgcggaacaggcggctctgcaacgtttgcaaaagagggagatgaaggaacatctgcccgaccttcttccgtcatcagccgcagtggaatctccttccctgaaaaattcccttcaccaccccaaatccctgaaagcggctgttctttatcaggaaatccttggaaaacccagagcattacgaagcgcatccttcagcggtgaataaagaatggcccttcccgggccatgttccgttcagccgtcatgctgcccccctcttattcattctcccttgcctgaaaaggtaagcggaggtaccctccatcccgcaatgacagacacacctttgcagatagccggacgccagttcacctcccgcctgatggtgggaacgggaaaatttccttccaatgagagcatgaaagaagctctggaagcctccggcgcccaaattgtgacggtggctctgcgccgggcggatctgacgggttcccacgatcccgccgccaatattctggatttcattgatccggaaaaatacctccttctccccaacaccagcggagcgactacggcagaagaagccgtacgcctggcgcgcctggcggcagcagccgggctgcccaactggatcaagctggagattcacccggacgcccagtacctgatgccggaccccattgaaacgctgaaagcggcggaaatcctggtcagggaaggcttcaccgtgcttccctacattaacgcggaccccgtgctcgccaaacgccttcaggaagccggagcggcggccgtcatgcctcttggcgcccccatcggcaccaacaagggagtactgacccgggagttgattaacatcatcattgaacaggctattgtccccgtggtggtggacgcggggctgggagcgcccagccacgcggcggaggctctggaaatgggagcggatgccgtgctcgtcaatacggctatcgccgcctccggctctccctccgccatggcggaggcgttcgccctggcatgccgtgccggacgcatggcttatctgtccggccttcccgccgtttcctcccaagctacagccaccagccccctgacttccttcctgcattaaaaggccgggaaaaagccccggttttctcccgcacccatgggtcaagaaactccgggaacatttttcgcaatcttcctgcgtatcaggaattccaggatgaagcaggcggctacaaacagcacaatcaacggaatcagataaggctggctgaagaacatctggtaaaagaacgcccccagaataaacagcatcagaagaaagcccaggatgataagcagcgcatttccctgagtctctttccggagccgccaatgggcgacgaacaccgccaggtagctgatcagaaaacaggcccccgccaaattggcgatggctaccaggttaaaggcattcgtcatcaccagaatccccagcaaaagatagaaaaaaccctccgttccgtggccccagaaaggctgtttaaaaatagctcccagctggccgttgcgcgccagagcccgggaaatgtccagcatgctgaacatggtggcattaatggctgatgccgtagcaatgagagccgctacggatacggccatgaagccccacatgcccaaaaccggataggcggcctgcgctacggccgtttccgtatggctttccagggaagtagcgggaacgttggacagtactacgtaggagagtatcaggtacaaggccagcacaaggccaatagccataaaaatggctcttggcagcgtcctggaaggatttttcagattgcccgccgtattggccatcattccgtagccggcaaatgcgaaaaatgtcaatcccacgctgcccagcaaaccgtccagccctttcaccggaatgggatccgcgcccacaggcacggaagaaccgaagctggcaagcattaaaaccgtcaaaatcaataatttgaatgccaccatgattacttccgactttccaacggccctggctccccccatattcaatgcccccagcagcaaaatagccacgctggcaaaaagggccgtggaataaatggtgactgccctgtccggtaaaaacaggcgggacgcataggctccaaaggatttggccaccagggccacggtaatgaccagcgttcccaggtaaataagggtcagtgcgccggacagggtcttatgggaaaaagcctcgttgaaataatccataattcctccggaaccgggataacgggaacccagtttggcgtaggtgtacccggaaagcagggcagcaacgcctcccagaataaaggaccaatatacattttttcccgccatcagggtcgcctgccccatgagggcgaaaattcccgctcccaccatggaccctattcctaatgcaatgacgctccacagggacagatattcttttggggccttcccgtacataagggatttagagatactacaggaatgaaacgttgacctttccgcacgggatgacacgtcctgcttattcatccgtcctgcagccccatcatgactattccggcacggctttccccttgaaccgtccgttgtcggcatgtagggtacggctgatgatcaaaaccgccatttttgattttgacggaactcttgccgacaccatacccctgtgccgggaggcttttcgccgcgctatccagaagctggacggcagaatattgacggatgaagaaatcgaacgccaattcggcccggacgatctgggagttatccagaaattgattcccgggaaaccggaactgcatgaacgcggcagggaactatttatccactactaccgcaagctgcacgcagacctggctcccgccccctttcccggaacagccgaattgctgagcactctccgcaacctcggcattcggctggccatggttacaggcaaacgcctggaaagcgcagagatatctctccagttttttcatctgtccgaattttttcctattctggaaacaggctccccggagggaggcgtaaaaccagaccgcatcaaacgggctttgtcccgtctgaatgccgtcgcctcagaagccatctatattggagacgcccccacagacgtggacgcatgccgatctgtccctatccgcattctctccgcaggatgggccgcggaggcggacatcaacggcctcagggaaaaaaagccggactttctcctgacccgttttgaagacctggaacgtttcttccgggaacatcatgaaaatgaaggcctttaagattgcaatcctgcaaaaaacaggctatcattacccaccccgttaatatcaatccttccatgacttttcagaaagaatccggaaaagagggcctgaaaattctgctcatgctcgccagcgtcattatcatcacggccgggctgcaggcgggaaaaccggtgctcctgcccatcgttttatccggctttctggcaatcgtcagttatccgctgacgacttttttcaagagccgtctttgcttcccgcactggctggcagtgactttcacggtcatcatggactttggcattctggtgggcctgggctatctggcccaatacctggggcaggatctggccaaaacagtcacggtcaaataccagccccttatgatggaaaaaatccatgaactccgcgctttcctgattgaacaggattggaacaacctggctgaccagatgcttcaggaacttccggacctgctcaacggccagcgcatcgtggcgttttccacaggggtgatggggcagttagcttccatgctgaccttcaccaccctgattctgatcctgatgactttcttcctgggggaagccccccgcttccgggcgaacatcaataaactggggcataacagcgacacaggcatccgcaaattctccaaggccctggccggagtccagaaatatctcattattaaaaccttcatcagcgcagttacagggcttctggctttcctgctttgctattacatgaacgtggactttccgctgttgtggggcatcgtggctttcgccctcaacttcattcccaccttcggctccatcatcgcggctattccccccacgcttctcgccatgcttctgatcagccctaccgcgggcatcattgttgccggcggctacctggtgatcaacacagctctgggaaactgtttggaacccatgctgctgggacggcaattcggcattgtgaccagtatggttctgctctccgtcatcttctggggctgggtatggggccccatcggcatgctgctggccgtacccattaccatgttgattaaactcgggctggaaagctctaaggatctcgcctggatcgcccagctcattgacaaccctcccactcccagattccctctcccccctctccattccgggaaaaccaacgaaagcacaaccaaggaataatccatgcattcattcgcttacaaaaacggcacgctctactgtgaaaacgtcaaccttcaggaactggcggacaaggaaagcacacctctgtacgtttatagcaaacaaaccattttaaaccactttcaccgcctcagggaagctctggcaccgcttaacgcggaagtggcctacgccgttaaggcctgctccaacatcgccatcctgaacctcatggcccgcaacggggcgggattcgacatcgtctccggcggagaactcttccgcgtcctcaaagccgggggcgatccgtccaaatgcacttatgccggcgtaggaaaaaccgagcaggaaatccgttatgccctggcccagggcatttattgcttcaatgtggaatccgaagcggaactgcgggccattaacgccattgccgcctccatgggagtcaaggctccggtggccgtgcgcgtcaatcccaatgtagaggcgggaacgcacaaatacattactaccggcaaggctgaaaataaattcggcgtggacttcgaacgcattgaatctctttatgagatggcggcccgcgaacttctgaaccttcatctgaaagggttgcaaatgcatatcggctcccagcttacccaggcgaaacccttcctggaagccgtcaggaaagttgcccccttggctgcttccctgaaagaaaaacacggcattgaatttttctccatcggaggaggcattggcatcgtttatcagggcacgctggattccggcgttcaggaatggtggaatgaggactgcgcccagctcacgctgagcacttacgcccaggccgtcgtccccaccctgcaacctctgggattacacatcattgtggaaccgggccgtcttatcgtaggaaatgcgggagcactcatcacgcgttgcctgtatgaaaaaaacgggaaagccaaaacctttaaaattgtggatgcagggatgaacgacctcatccgccccgccctctaccagggctatcatgaaattatcccggtcagagaatacccctccgaatcctgcgtcacagcggatgtcgtgggtcccatctgtgaatccggagacttcctcgcccaaaacagggacatgccggacgtgcgccagggagaactcctggccgtactgtccgccggagcctatggtttttccatgtcttccaactacaattcacggcctatggcggaagaagtcctggtggacggggaccaatggaacgtcattcgcagccgtcaaagctgggaagacctcatccggggagaatccattccggaataacacccccatcccgcccatctttagaatgcccttccaacgataaaacgaaggaggggcatttcctttcaaccgtactgaatggaaaacaaggcagaattttcaagtccgccgagccacgcggagcttctttccggagacgccgcacgctactgccgtacggactccggtggaccggtccggccgcaagtcacaatgagccgaacatgaacatgtcccgcaagaacgttgcaaccccggcgtgcgcctgagttcagccttgccctcctgaaaaaaaacacctatcatatccccgttatgccaatagccacaccagaacaatacattaccatgcttgaaacggccaaaaaggaaggctacgcctatccggccgttaacgtgaccacgatcgaagtcatcaacggcgctctccgcgctttttccgaagccaaaagcgacggtatcattcaggtttccatcggtggcggcaaattcgcctccggcagctccgtaggcaattccgcccttggcgccattgttctggcggaagcaacgcgccgtctggctgaaaagcacaacgttctcgtagcccttcacacggaccactgccagcccgaacacgtggatactttcctgcgtcctctgattgccgaatcccgccgccgcgtggaacgcggtgaagcccccctcttcaattcccacatgctggacgcctccacgcttcccatggcggaaaacctcaagctttcccgggaactgctgaaggaatgcgccgaactgggcatcgttcttgaaatcgaaatcggcgttgtgggcggagaagaagacggagtggacaactccggccatcccgccgacaagctttacacttctccggaagatatgctgatgacgtatgaagccctcgcgcccctcggcaaattcatgctggccgccactttcggcaacgtgcacggcgtgtacaagcccggccacgtcaaactgaaacccagcatcctgcgggacggtcaggaagccgtggttgccaaacacggtgaagcggctcgcatgcccctcgtcttccatggcggttccggttccgaactttccgatatccgcgaagccgtttcctacggcgtcgtcaagatgaacatcgacaccgacacgcaatacgccttcacccgcccgatcgtctcccacatgtgcgaacacatcaacggagtgctcaagattgatggcgaagtgggcaacaagaaggattacgatccccgttcctatcttgccaagggtgaaaagggagtcgccgcccgccttcaggaagccgccgacaatcttatgtccgccggcaagaccctctttggcaaaatctaaaaagagttccctcaacgaatttgatgccatgcccggtttcttttaagaaaccgggcattttttctggaaaaacccgccaacagggtaaggcgggaaacgctttcaccgagtatctatccctctgagacgacgggaaaacgaaccgttccccgtcttcttcttttctgtactctgggcttctccgattacgggaccattaactcgcattcttccacaaggaaaccgctgcggacatataacacaatagccgcacaggaaaaaccggaattattcataaccgaacaaggccattcctccgctcagcggaccgcagggaacccggcaacgcggctctatcccatcaccgcttgaacacaggagcctttccccagcgctccaggaaccttaatttcctgctttgcgggattcccttacgcggtcattggcgttcaggatgcgcttgcgcagacggataaaatgaggcgtagcctccaccagttcatcaggttcaatgtactcaatggcacgttccagagaaaaaatgacgggaggggaaagctggatgccgtctcccttcgtggctgagcggatattgttcaaatgcttttccttgcacgggttgaccggcatatccatctgccgcgggttttcgcctacaatctggccttcgtaaatatcttcctgcggccccacaaacagacgcccgcgttcttccagcgctaccagcgcgaacggagtggaaacgcccgtctccatggaaaccagggtgccggtggtacgcgtggtgatgtccccggcataaggcccgtaatcccggaacaggtgggagaaaataccgtggccggacgtcagattgaccagctcaaattcaaaaccgataataccgcgggtgggaatataagcctgaataaaagtatggcccgtgccttccctgcataccatgtcttccatctgtcccttgcgggcgtgaagaagcttcatgacgccgttggcatgttcgtccggaacttctacgtacatcgtttcatacggttccgtaaggcggtcgttttcatccctcttcatgatcacggtgggacgggaaacgcacagttcataattttcacggcgcatagtctccaccagcacggcgatctgcatggcgccgcgggcggaaacggagaaaacgccggccttgtccgtatcctccacctggatggaaatattcgtccgcatttccctcatcaggcggtcgcgtatcacgcgggaagtcacattcttgccgtcgcgccctccgaaaggcccgttgttgatggaaaattccatggaaatggtaggaggatcaatcgccacgaatggaaggggctccgtatccgcggaaccgcccaaggtttccccgatattgacgttttcaaaccccgccacccctacgatgttgcctgccacgccgatggccgaatccgtagtgctcaggccggaatattcaaacatgcgggtcacttttccggaaatgcaggagccgtcgctctgatggagccacacggtatcccctttcttcacagtgccggaagtaatgcggccgatagccacacggcccacataatcgtcccagtcaatattggaaacgagcatcttgaattcaccctccggatcggcatccttcggagcggggatatgttccacaatcttgaataaaagaggagtgcagtccacaggaggttccccctccatggaattcatgaagtaaccgtcgcgggcggaaccgtacacgaaaggggcctcaaattgttcatccgtggcgcccagctccagaaaaagctccagcacctggtcatgcacggcggcgggatcggcatgcggacggtcgatcttgttaatgacgacaatgggcatcagaccttcctgaagggccttgcggagcacaaaacgcgtctgagcctgcggcccttcaaaagcgtccaccaccagaagcacgccatccaccattttcatcacgcgctccacttccccgccgaaatccgcgtgtccgggagtatccacaatattgatcgtatatccattccagaggatggatgtattcttggccttaatcgtgatgcccttttctcgttccagatccatggaatccatggcgcgttcctgcacggcctggttagcacggtaggcgcctcccgcctgcaaaagttggtcaaccagggtcgtcttcccatggtcaacgtgagcgataatggcgaggttgcggaacttggaaggatctgacattgcgcgcgagagctaaaaacaccggaaaataaatgtcaagtctgctccatgaataccgactatattttcagcggttgcaagcctccctgccgccattgccgcaagcgatggaacttttattttcctccggcgcatttatagcttccccccctcctcaaataggagtattctgttccggcataagtaatttctcaattctagataacaatgaagatttggttagatggaaagctggtggaacaggaggaagcaaaaacctcggttttcgaccacggcacactctatggagacggcatttttgaaggtatccggttctataataagcgcgttttccgcctggaagaccacatggaccgcctgtacaactgctcccattatctgttgctggatattccttacactcaggaagaactctccaacgccgtatgcgaaacggtcgcggcctccggcctgaacgacggctatatccgtctggtggttacccgcggcgtcggcaatctgggacttaacccattcaactgcaaacggtcctgcgtcttcatcattgcggataaaatctccctgtacgatccgaatgtatatgaaaacgggctggccctgattaccagctccgtgcgccgcaaccgtccggacactgtttgtccgcaggtcaagtcgctcaattatctcaacaacatcctggccaaaatggaagctgtgcgccagggtgcggcggaagccctgatgctgaacgacctgggtaatgtggccgaatgcacgggcgacaacattttcatcgtgaaggacggtaccgtgttcacgccgccagttacggacggctgcctggacggcatcacgcgccgggtagtgctggaaatctgccgggagctgcaaatcccggctcaggaaaagaccatgaaccgctttaccatcacttgtgcggacgaatgcttcctgaccggcactgccgcggaatgcgttcccgtgaccaaactggacggctatcagctgggctctggaaaaatcggtcctgttacagctcgaatcctggcccgtttccaggaactggcccagaccacgggaacatcctgttaaaatcagccaacccttttttggaccaacgaaaacggctccgtcatccggcggagccgtttttttgcgctattccgttaaatataaaaaagaaaacacaggtaagcacattcccgcggagctatacagcaatctcctctggaaatgcagacttgtgaccttcacggcctcccgttccgaaacactgcagaagaatccaatatgaaaagccgcgccatttgtgaaatgacaaggcaagtgacatattgcatgtccggccgccacgccggacatgtctcaacctggaaaaaggctatttcttcttgggcaggccggtttccgggtcaaactgcttagcctgctgggcatgttctttcgtctgatagaaccgaacgtaatcaaccaggaattttacaggatacccttgcccgtctttaggagctttctcgcaccaggtgccgcccacggcggaattgagaatgagatagaacggcgtacggaacggattccccgccccattggcataattggtggtattaaggtcaatggacttcaccagcttgtcatccaccatcaacttgatggaatccttgtcccattccatgacataggtatgaaaatcatcggaaagattatctatcttcacagtccctccgcgggaagcatcccttttggacacgccgtccggactcaaatggaaagtggaataaaccacatccggctgttgggaaatattctccagcatatcaatctctccattggcgggccagccccatttattcttgccaagcagccagatggctggccagatgcccttggttttgggaaccttggcacgcacttccagtctgccgaacatgaaattttttgtcttgatcgtcgtaacggaaccggaggtatagggcatgaacttggtattcttgatccaatccgccgaactttttttgtaattgatattggcgaacttttcaaaatgggtttccaaaaccaggcagccatcctccaatctcatattcttgggtcggcctgtataagtctgctgggatccctggttacggattactcccaactccggtttccactttttggcgtctatcctggaaccgttgaactcgtcaccccagacataaacccatccgccggggagggtcctcggaggtttggaatcttctccctttacagacatgcaaaggcatgcagtcaataacacggcaaataggctcttcttcatacggagcaatactgcacctagttccgcagcctttcaaacaaaatacatcattcgggacctcatacctcctttcccctgtcaaatggcgaaatatcctgcaaaatgaatagaacttttaacccggcacatgctatggtcatgatatgaaaaccacttttcctccccatgcccgagcgctcctccaccagacgcctgcaggcgctgtcgtgattgtggaaaacggcacagccgtcacccatcttttcttcagccgcatggcacagccggagcatttggaatgggaggaaacacccctgctgcgtcaaacggctgaccagctggatgaatattttcaaggttcccgccgcgtatttgacgtgccgctttctccccagggaaccgaatttgaacgaacggtctggaaagcccttcaagccatcccctatggagaaaccagaagttacggagacattgcccggcgaataggacgcccatcagcatgccgggcagtaggacaggccaacaatcggaaccctgtcggcatcatcatcccttgccaccgagtcatcggagccgacggcaaactgaccggatatgcaagcggcctgaccattaaacaatacctgttggaattggaacagggctccgccactcctttcacattattcacggatgtggaacgcatgcccggaaatactccggccagtccataaaacggcaggactgaaaaattccggtcagtgctgcataccgttttccgtctgaggaagaggcatggatttcaaggcggccttgggggattcaatatccagccattgaagaggcagcaattcacccgttaccctgtaatgtttgtaggttaatccggcaaacacagccagaaaaaatatcaggacggcataaagagccatccataaataatgattccgggtcgtgcgggcggcttcatccgccaactgctgtaagttccgcatagcgatcgaagggacggcatcttcttctctcccggatgattcggcagaaaatcccggagatggctcttccgcaaaccggagcctggcatcccccaaagcgatttcatcgccatcgtaaagggtcgcggcgaccatcggcgtcaggccgttgattttagttccattagtggagccaaggtcttccaggacatatcccccttccttaaactgaagcaaggcatgctctccggaaaccgactgaaagggaagcacgatctcgcaatgctcgtcacgtccgatgcgtgcgaaatattcaccgttctttggaagaactatggttttttcagaaccgtcgggaaggtggatggaaaggcgtggcatgattcccggaaatcatgccacgcccatactcattttcaatccaaaagaccgtttgcccatcacgtataagaaaaatggcaatatccgcctttccccagaaagacagaattccatgcaaattcatgatatgggttcatactcctcaatttttatttttcccgcagactttcgaaacatattttaagcaattacagtggcctccagagaggttttccataagtaatccactcatttcaaaacattacatgaaatattgaatcaattttttcctgattggaaacagaccttccgaaactgcgacggatcatgccggacacgaacactgcgcaaacgtcaatcttcaaggggtacaacttgttgggaatcgctaaacaggccattttcaaatatgccgttttccaggagggccgtcctctcggagcatagggattggatatgcgctcaaactgccgtcccgcctttggacatgcccttcactatctcaataattttcttatttgcctggagcggctcgaatcaaaagaactcaactgaaatttttatctgctgtctggcatctgccgctccttttctggcatggagtttattcaccctgggttcccttccccgtccgttacatgcagacgtctgcatgacaccaataaaagcggcatgttgctgccgctatccctgactcttttaataagaggaatttttcttttcatctattgctgagaaaacagccagcacggcacaaatcaatccggggcatcgtaaaaacatccggagttcccgtaatgattcgaaatcctctttcaccgaaaaagtcagcggcctacaccgtggaaaagccgtgcagccctgcacatgtcttgcgttttgaaggaaaatgtttcatatttagaacatgtttgttgacaacatccgcatattcgccagggcaggaaagggaggaaacgggctggtcagcttccgaagggccaaattcgtgcccaaggggggcccggacggcggtgacggaggcgatggcggaagcgtcattctggaagtggatccgcacacgaatgacctgcgttcttttttttatgatccaaaattaatcgccacggatggggtaggcggacaaagcgccaagaaacatggcaagaacggcaaatccgtcatcgggaaagtgccccccggcaccattatctaccgcagcaatgcctcttccatggcggaggcgacctggctggaacgggaaggtgaaggcattgaactggaaaaaatagcggatctgacggaaatcggcacccggttcacgctgtgccagggcggcctcggcggcaagggaaactggcatttccgttccgcgaccaaccaggcgcctacggaagccgagatgggaacggagggggaggaaggagtcttctttatggaattgcgccgcattgcggacgccgggctggtaggctaccccaacgcgggcaaaagcacattgctgggagacatttcggaagccaagcccaaagtagccagctatccttttaccacgcttcagcctatcattggagtggtggaattcgacagctttcgccgctgcattgtggcggacattcccggcatcattgaaggcgcacacaacaaccggggcctgggacatgaattcctgcgccacatcacgcgctgcaaagtgctcgtcttcgttctggacatggccggcagcgaaggccgcgaccccattgaagaccttcagaatctccgcacggaaattaaactgtacagagaagacctggccaaacagccctggttcgtcgtcgccaacaaaatggacctggaaggagcggaagaaaatctggttaacttccgcatgcgtttcccgaaagtggacgtcatccccatttccgcgctcaatggagacggtatttcccggctcaggaacaggcttgatgagcttgtaggttataaattcatccgttaacttattcattcaactttctttcaacctttgacatgacagcccctctctccgtaacgacagctcccgaccagcttctgtgccgtatcgccggaattggagacctcttcgccattgaaggggaattcgtcaccgggaaggaaatccccagcgggcacatcaacaccacttacaaggccacctaccgtaaaagcgacgggacggaagattcctatatcctccagcgcatcaacgattacgtcttcaaagaccccaaagccgtcatgcgcaatgtggaaaaagtcacgcgtcacatcaactggaaagtcctgcgccgcctgaaagattccgccggccaaaccctcaacctctacccggcccggggaggacgcaactacattgacatccccggcgacggcatctggcgctgttacaactacctggccggcacgcacacctacgacgtggtggaaaacacccgccaggcctaccaggcgggatttgcctttggctccttccaggatttgatcagtgacatgaacccggacgacatcgtggaaaccatacccggattccatcatacccggaaccgcttcaaccgcctgatggaagtggcggaactggatccgcaggggcgtctttccacctgtctgcctgaattggaattcattaaagcccgtgagcaggatgtggatcggttgctgaatctccaggaaagaggcgtgcttcctacccgcatcactcataacgacaccaaaatcaacaatgtcatgctggatgaggacacagaccacgccgtctgcgtcattgacctggatacggtcatgcccggcctggtgttgtacgacttcggagatatggtgcgcaccgtcactccgcctacggaagaagacgaagaagacctggacaaggtgcgcatgcgcatgcccatgttccaatccattgtagaagggtatctgtctgctgcccacggtttcctgacccaggcggaaatagaccagcttgccttctcaggaaaactcatcacgctggaaatcggcatccgtttcctgacggactatctggaaggcgacccatacttcaaggtctcacggccgaaccacaatctcatccgctgccgtacgcagctcaaactggtggaatgcattgaacaggaacttccggccatggaacaatatgttcagcgcgtcgccaggggaatgtccagaaaataaggaagaagttctccctcttctattccaccacctccggggacggctatgccgtcccttcttttttatattatttgaacatggcggcccattccataatccaagaaacattacacgtaatagccataagccatgtttgaaataccagacatccaactcaatcaatatggcaagccggcaaggatcatgttcctggctccatatgcccccgacgctcccgatttctccaaaaaaccctacacaggcaatggaggctaccctcagtaccactacaacatttataaagccatccaggacataggctatgacgtcgtctcctcctccaaaccctattccgtccaattcgccaagggaaacgtggactatgtattctccctgatgaacaggttcgccatgtccagacctgaaatattcatttcttcctactgcgaattcattcagattccctacctgggcgcccctcccaacatccgcgccatagcggaagacaaattgctgaccaaaatggtattccgctccctggaattgaacgttccggaaggcattggactttccggagaaaaaggtattccggcccaggcccctttcccaggcccctattttgtcaaaaagcgttttggagccgcttcaggcggcatccgggaagacagcatctgcagctcctggaaagccgtggactcatgcgcccggcgcctgatggaagaagggcacgaagtgctcgtggaacaatactgcgaaggcattgacgtcaccgttcccgtactgggcggggaaaaccccgtcatcctgggatatgtgcagccgaaatccgacaaaccgggcagcatcatcacggaagacctgaaactgcacgaccatctgggctaccaactggtctccgttcaggatatggagcaggacatcgcctgtgacgtccggaaaatctggagcgctctggggccgatggactatttccgcatcgactatagaatcgacttcgagacgggagaacggcgcattctggaaatgaacatctgctgccacctgggcaaaagcggctccatttgcctggcggccgcggaacacggttactcccaggcagacctcctcaaatacattatcgcctacagcatgcacaggcagaagaacctccgccaatacggcacatggctcatctgacccgcagggaagaaacggttcgcattccggtcagagcaaaagcggcacttcacgaatccggtatccggctgattgcctcaaacacctcctgccagctttccatggaagcttcctggccgcccagggccatgccccgctcacgggcggcagcggccatgtcttcccggtagtggggctcccaagccatcttagtggcgtacgtgatgaaatcaccggggcattcgcacagccatccggtcttcccgtgttccaccatttgttcccaccccccgcgcctgtccacaacaagcacactcccgcttgccatggcctcaaaacccacacgcggccaattctccgtcgtatcggtgggctgcaaaacgatgtggcagcgccggtaaaactcctgttgggacaaagacttttgatcatggaaagtctccacccaatcgggaggcctgccggtcttcgcctcgctccgccggtcaaaaccgagaaaagtgcccttcttccggacaggagaagcaaaatgctcgtagatatgccacgtatccttgctgaacttatcttcatcctgccgggaaatgtgtccggctccaaaccagtccgtggaacgccctgcagcaaaaggaaaatctgccgcatcaaaatacggcctaaacgtcatgaaccggatggccgggtcgggatttaaagccctcaggcgaggcatgacgtttcccattacgttgctattttgataaagaaacagggaaatatctccccgcctcatggcttccttttccctgccgaaaagccaggtcatgcaattgacgaaaactgtccttcccgtccgttttcgtatcttcgggagagcagccagaaactcttcattacaaaaactgatgacgggagcccctgccggaatggcctcccaatcatagccttcatgcaccataacacccaatttcaccatctccggataaagcccggcgccgtgtgcatttttctgggtggggataagatgcatttccatccccatctgtctccaaaccttaatctggtgataaagctcggcccccgcaccgccgtaaagggatggaaacccaatgatgtagagagaatatgtcattaattgattcatgcctgaatgatatttccccggaactgcatggaatagtcttgccgcaaggttttcagaacactttaactattgacattcaataaattgatccgaaaaaatcaataaaacaagactaaagtaaacaattcagttattttatcttcaatgaaaaagattaatattgccttcccatcctttgaatttggttcttgtccctctcaaaaaagagctgatgatgtagaaattcttagtccatattatttcagttgcaagggaagttgttccaacgtttttttagcgctttcacagccttgctctgctgctttttttaaccattcagatgctttcttaaagttctgcggacaacctcccaacccttgcaaataatagaggcctaaaacgttctgagcattcatgctaccctgggtagctttttttattatcatagcggaaagcatttcggagggggaatactcattttcttccgtttccttttctaaaattttagctatctccaaaaacgcctccgcatatccatgactggctgacaacttggaagaaacagcagttacagcttttcgagcaagagttagattataatttgaaaatctattaaaaagatcgtcgttatttctaaatccgtatttttgaagttctttcaaatattcaagattactgcttctacttccataggaattgtcaagcaacttttcagctatatctagagttacttgcttactcttattctgcgtaattttcaacaactcctcatattgaatctttatttgcttttgataaaaaataggtaatttggggaaccagtcagaattaatacctttctccaccacaccttttaaaccctgaagaaattggggatcgaccaaatctatcgcgggatttccttcctctccttcttgagagcatttcaaaaaaccagccatcaaacggaatttatcagcataatcctgattaatgtagtgataaagggctttcctctcttcagaagaaaataattttaatccggaagaagaagactccagttctttcaaataagaagggcttatctcccattttttcaaaaactggttgttttctcctgatgctgtgttcaacatacagctggctatacacgaaatggttaatattttatacatggggaaattgttttttacagttttctacacattcattgtatttagcctgaatagatgccacagttatgaattgaccgaccccttttggtatcgaagatcctagacaatcaggattgtatcgtataggggggccattgactggacgacaagcctgagccgcccccaaactttcactcaataatttaatcgctctatcccatcgcgattcatcacattctttagaagttttcatcatatcctcccacactttggaatgagtatcttcagtttttctattcagttcttctgaacttgcctgtctttggtcatcacatcgcttcacacattcatcatattgttttgtaatttttcaaaatttaattaaaaattcaaattaaaaaattgtttttcataaaaatatataactaactagaaataagataaaaatgccgctcaataaatttttccacagaaattaggtaattttcatttcaagacataattaactttatatactcctcagcaagtatattactttttctgagattcctcatctagataattagcaaattcaatgtatgcattttttatgactatttccatcgtactttcatcgttgggatctatgattactgttccgttattgataaatttctcaaaactatttgcgactgactttgccataatatctcttggattttttcctataaaatgagccaatatggtgttccagtcatatccatgtttcttcatatcattacgaaattgattttcaatcacattctttttgtttaacagaacaacggttttaaaataattacatttactcttatccattaaaatttgatttataaaaaaacatctggaaagatatttttgaactatcttcggtaaatattcagtatcgaatttcagataaaaccttatagactgatccaatataaattggttgtttggatcacttaatatagaagaagaatgtttggaattacctacagctcttaatagagaagctgtagatcgaagcacgtattttcttaaatattcttgttcttttattgaaaaatcattcccagcacagtttaaattttgaccattattcacatcagaatatacattcatcgggaataataaaacaaaaaatagaaatatttttctcataatttttctcgatttaatcatatgtttgcctgcattttagtttacaatttctatattcgacaaaaataaaagctaatgcaataataaatagaattccttgaattttactctcttctacagatggtcctccaatagaagagttagattgttgtgcacggtcatatgaatttaaccatcctccacattgtccctgtaaacgattttcacagtcatttaaacaatcttgcaattttttagaataattttcaatgcattttatatacgcgttcatagcagctggctgtacccatgacatatctggacattgtcttcccaatatgtcaaatgtattagacggatgatttctgacaaaccaatataaactgtatttgaaacaggcacggcaattggctcgactttaggaattacattctcagatattttttaataactttttctgtcgttcctggggcaataacttcagtaatggctacggtggttactgcaacagcagtaaccatcaatccaactggattcaacaacgccggcaatgcaaacccaaattttccttgtatgtctataaaagcgctggggaaatttcccacatagccatacagattttcctgaggtctttccatcattggctcccggggcaaccatccaaagttttagtagtttcaaagaaagaactattcaaaatggttttttcaatatttgaatttaatctattaataaataacgaatcacatctaggtatatcattatttttcaaattttcaaaatatgccatcattgagttgaatagtgaataaattttaaaggctgttgaatcctcacgcggtaataacagtcctccaaaaactactccaaaaattttcgaattgtatccgtatgcaaccagaggagttccagcaacttcatttccatatgccccaaataaattaattataaactccagattttctaacgacacttgctgattaatcatatttgataatttatattgtttcattattttcatcaaagcgctactgacgacgtcttcagaatcagaaaccataatagaatattgtttcatcattttattttcaagaagacatatataataaaaatatattttattatcattcaaaaataaaatattatatttttttctttcttcatctgctgtcaaaaataaaatatcatacttatcaggaaattcagcctttaaacaaggatgttcttcaacccaacattcataaccaagaaaaggcaaaatacttctctcttcacataaaaagggaatgtatgtagacagacttttatttattatttcaatatctgaactgatttcttttatcttatgcaaagcggtttctacagctgcatccaacggggtaatattattgtttcccgcaaataaaatattacccgccgaaataaaaataaataaataatattcatagtcactgtcttattccattaataaatgttgcatttgtttttcctgcaggtctgttagggttatagagatggatacgcatattatcatcccgatctcttactaataccgtaattattactactgaaaaaattttaacattttctttcatttttaatatttttcatttatatgaatttattataatgtttataattaatttttatttttaattgccgaatctaatattttaagagcgttgttacagctatctgcaaaataattatctttattttgaaacaatatccacttccttacaatttcaagctgattttttgtataagaacggtatatataatttacttctttttgtacataagtacgtattctctccgaaaaacaaacgacaataagtttattcatcatccattcctcagcgtcagccatataattattcacccttgatatttcttccatataagaattccttataatagaagggaagaaatatgcaagggctctgcttgtagcaaaactcacaaattcggcattatcgtaccattgtatcgcaggaacatcaatccagcgctggtttaaaaacggttccccgcattctcgtccttcatcatccggataatcaggatttgcaataagattgcgaatgttttttgttggaaaaaaagagttttctaaaggaaattctctttccacttcccgaatcatatcattcaaatttttatgagtataataattcaccattatagtaatttttttctgcattctttatataaattccaacatctttcggcaccttttcctatctcttcagactgctctatatgtccattatctccaccatcaaagcaatttgaatcatacatttttcttgcttcttcagcattttttaatttttgagcccgtctcttaaattcatcacaaacagaagctgttggatgctctgggatacataattttttgcatgattgacctcgagatgcttctttagcttctttctttttccgctttaattcttcacaatctgctttgggaactgtatttgaaacaggcacggcaattggctcgactttaggaattacattctcagatatttttttaataactttttctgtcgttcctggagcaataacttcagtaatggctacggtggttactgcaacagctgcaactatcaatccaactggattcaacaacgccggcaatgcaaacccaaattttccttgtatgtctataaaagcgctggggaaatttcccacatagccatacagattttcctgaggcctttccatcattggatccctgcttatccacctgccattttggggattataatagcggtaattgtagtaaaccagccccagttcgtcatcagcgtattcgctggagaaccggaacggattgtcctctgcggcatttccttccatcctgaggatattcccatatgggccgtattcgtacaaggcgcggcgtcccgctcggatgccgaagagcgccgtagcgtttttcaacaggtcgtgcgtgcagtacaggtcttccgcccaggttcccttttcatcaaagaggctcatggccaggatgcgcgtggctacctgctccagaggatttcacagataggtttttcttaatacgggcgttatcgtttccgttgtccgatcatattgtaatattacttcacaatactattagttcaagatcttgtaaaaaccattgaccgttcttattgaatgttgctgttctaatttagatctgcacatattatattaatcattaaaaagaatttgatatgtagtttcttctagaaaagaacatgaagagggtcgcttgaacatcttctttcgaaacgtcaaatcggatatatgccacacggtcattagatatgatgatgaatataataaaggaaatcctatattctcaatcttgaagagaggatgacaatataaattattatatctaattattcataattttatcttttaattttatgcattcatttttataatcgtaaaatggattgttttctattatctttaatattcttcccaacaacgttctttcactttcattcaaatccttataattttcaataacagcatcaattgtatgttctacaaatgaatcgatattcccaacttcatatttatgataatccccaaaaaaatatttgatagttaaatttaaacatgccgggaaataatatctaagaaaagatgtcgaaaatatataattcggcaaaattgttgtatcgtattcaagtggcattaaatcatgttcccacgagcattttaaccaatttattttatgaatatgaacatattcacaaaattcaattgcaggtaacgcaaaagattctgatttgatcaaatcaatgcatatttcgaattgtttattattcggaagcggaaatacaggatatataaccttcattgcatcaataaaggattgataggataggaaattagtattcacgatagataaaaatttaattttatgaattttttgactgtggaaatttttataataattgattgagtttatcttggcaacgttttttacccgctaaagcgcgctcaatttcatcattatgtgcattatctccaccattgaaacactcattatttatttttgttcttgcatcaatacaatcttgaaatctttttatatttctttctatttcatctttacaaatatttttgtttttacaatgcattgatggacctttgcatttacgaccaacctctttatttaattcactatgtctccgttttgaacaattcccatatttaggtttttgaggaattgctattggagctgtttctggaactgctttatctgcagtatccgagtttatttcatctattactttttcagcaactaccaccaccgtcgcaacagctacaactactgccgccgccgctactaccgccactcctataggattaaatagagcaatcgcaaacgcgaattgccctcgcgcatcgatcaaaatagaaggggtgttatacgcatatgtataaacattatctcgctgtttctctataacaggatccctgcttatccacctgccattttggggattataatagcggtaattgtagtaaaccagccccagttcgtcatcagcgtattcgctggagaaccggaacggattatcctctgcggcattcccttccatcctgagaatattcccatacgggccgtattcgtacaaggcgcggcggcccgctcggatgccgaagagcgccgtagcgtttttcaacaggtcgtgcgtatagtacaggtcttccgcccaggttcccgtttcatcaaagaggctcatggccagaatgcgcgtagctaccggttccagcggatcccacagataggtttttcgcagtacgggcattgctgtttccgtcgcgtcggcggcgtccagttccgcgatttgcaggtagccgtgataaatgaatcgttttttcgacatcaggacttctccttcatagacggctttctcaatccgcctgttcagatagtcgtagcggcactccacccgcctgttcccctgaataaaccttgccgcctggttcagggcattataagaaacttcccattctcctgtggacgtttgaatctttgtctggttgccgtcggcatcatagccaggcgcgaaaggcgcttcttcctcccgggtgatggccgtgtactggttcaggctgttggccgtgtacgccgccgctgacgcacccgaaccttcccgggaggtgacgcggttgccgatgttgtcatacacataggaatatgttcccccccggctcatcgcgtcggcggccagttcgccgcggccgttgtagctgtagctgtgcgtcaggtcaggagcaggggtattgaagtagtccttcttttctgtgggccgccccagcgcgtcataggcgtagtcggttttggccgggtagttgacgctgccgggacgcatatagtcgattctggtcagcagatcccgtttttcttcccgggtgtaccatctccggagggtattggggtaatcaagcgtttccagcagtccgttgacggcgtggtaaccatagacgaagggatcggcgccgttattgagcgaaaccgtagaaagacgtccgcaaccgtcatattcccaggccgtctgctggacaacgccctccccgtaatgcagactgtaacccgaaggccgccccaaaccgtcgcgcagatagttgagcgcgcttgccgccagccctgccgcagtttccgattccgcttcattatattggttgtaagccagcgtcctcgtgccggaatcgtccgtgacctgcgtgagcaggttaaggtgattgtaggtacaggtgatggaaggagtcgcgtcgttgtgagtgacggagaccaggttgcccgtctgcgaatcgtaggcataagaagtcgccagaggcgttccctgcccgtccgccgtccgggcctgtcgtttaaccgccagcctgttccagtcatcgtaagagtagctttccccatggccgtcggcataggttttaaccgtcatcaggccggaggcgtcgtcatagctccacgccgtcacgtccccgtccgtccgttcccgcggatcggcagcgatggtttctcccggaacgcggaacgtcatgagggataccagcctgtccgcatcatcgtagccaaagacggagggctgaagggccgtaccgtattcggcggttttgcgtccccgcgggtcgtaagcgtagcaggccgtgttgcccaaagcatccgtgacgcaggagggagaagccgtggacgggtcatactggatggcggtcgtattgccggcggcatccgtcctggctgtttcacggccggcgatgtcaaagacggtaacggcggcattgccgcgggcgtccgtataagtctccgtgctgccgctggccgtataagcgcgggaagaggtggtcagaactcccgcatggtctttccgggatacggcgtaaccgtctatgacgacagtttccgcaatgacggaagaagccggagactgcgtttttaccgtccggccggccggagctgtgtattccgtccattgcagggtttcattgccccgcggatcggtggagatgttttttccggccagcaagggggacaggaaggaaaccagttcggccgtgctttccgtatatgttgttccctggctgttgcagcgcgtgactgtggttacccggtacacgccgtcttcccgctgccggcgggcataggcgtactccgtgactagggagttggcggatgtggggttttcggccagcttgagcgtggttttgacgatattgccaaacgggtcatagtcataaagcaatggagccattccatccacctgctgccgcaaaagcctgttgttcagatcaaaagcgcgccggtcatgaataaggccgccgttggcgttcgcccgggagacgcgcaccatgttgcccctgccgtccgtgacggtttgttccaccagcgccggttctccctccgcccggggaagcagcgtggaacggaccacgccttccgcggagtattccgtacggtagaggagatgcctctgccccgtgccgctctgttccagtacggttccgtccgcatggcggatagtgacgagcgtcgcgcccgtcggcgtggtgacggtttccgtcaggccgtccgcactgtaggcatgcgtattgctccttcctaatacgtccgtttcctgcaccagctgccccagcaaatcgtaagccctgctttccgtcgtcgtcatggggccgacgtcccggcgcgtttgcaggattctgccgaaggcgtcccgcgtgtagctgacgatggtttcaggcgtgacgattgtttctccgtccgtgacttccgaccggctgacttccaccagctggcgcgccgtattgtaggagtaagtagtcatgatgccgtcttcatccttttcccacaaggggccgcagcacatcatctcccgttccgtcaccctgccgttgccgcgcgtacgcttaatccatcggttttccttgtcgtattcgtaatccgccgtatccgtcagcgtccaggttccatccgtcagcaaggcgtatttctcaacgcgcgtgttatttccctgagcggaaacgtacgtgactttcctcgtgctgtgccccggcacggcctgccccgctatctgcgtttccctggtctccctgtagagggcgccgtactggctggccgcctcatagccatagaccgtctgcacgccgctggcggactgcttcatcttcagcctcccccgggcgtattcgttaggcgccgccggcaaccacgtttccgtcacttccagctgctctccctccgcgcccaacgccgtggtgcgtttttccacacggcgcacatggttggcttccgtataggcgtaatgcgtatccgtcagccgggcagcgttcatcgtgagcaccacgtactggtgcgcaatatccggatcggcatggtcggagcagcggtaataggtgtaggtgcccttccttcccccgcccgcccagggttccatccggacggtttcacgcccgaaggcgtcgtaagaccaggtcttttcacttccgtcgggggccgtctcccggatcagtttgcccgcggcgttataagcgtaagtcgtttcacgggcatagtcggttccataagcctcaatacggctggtgcacaggttgccgctgcggccctgttcataggtttcgcacacccgggaaataggagcgccgttttccccgcgctgcacggtagtgaagagtttccaaatccccgaagacacctcctgcctttcacggatcgtgtaaatcgcgtcttccccttccccctgggacatgcaccaggcccctcccgttccctgccagtagcgggtgacgtaaggcgcgcgcccttccgcctgctccgtgacggtgagcttgccggtctccgcattgccctcaatggtgaaggttttaaaaggcgtccccgtaacggcgtaaagaccggtggaaacgtttttggcccccacctgctcgggcagataaaaggcgatcacatagcccgtattcgtcacgttctcaatattggccagaccgtcccacaggttccagacctggcggatgacatcatctgcgcttcggacgatgtccaggtaattggcaaaatcctgagccgtccatgaagaacccagcctggtccggtagccggaggccgcgcccaaagcggaaacggaagaaccgccgtagatgactgtattgcccccggcgttgctgaccctcatttccgccgcgctggcggaagccgagacaacacgcccctctgccgcggcatacgccatggaaacggaacccgtccttttccgcgagccgccgatggagcctgcactagccgcgccggcatagcagtaatagttggcgcgggtgcctccgttccggatctggaatgccatgtcagcccccaactcccgaccggaagggggcagaatacagctggccatgggatgcaggtattgcagggctgcgggcgtccacaacctggaagagaagtgataagccacaatttccagcatcccgtacggcacgccttccataccgcggaaggaaccgaagctggtgcgccataccatgctggttttccgcgtctgggcagttacccgtctgcctgcggaagagaaccttccatatgcggaggcggaggaaaccaggctgcgcacggcagacgtactgggggaaccgccccggttgtccatgcagtcatccggggaaaaaggattgtccggatcagtctcatcctcatccccgccgttgtcgccattagggcatggattgctggaactgctgttgggagaactgctgcttccgctgctggagcctccgcatggatcatcgtcgccctcgtcgttgttgtccactggctccgtttccgcctccgggggcacataggaagaagaagaacccgtttgccggttggtaatttccaccttcaggtcaaaggagaatttggcaatgttgttattggcattgggaatggaaatattgctatagtccacatgcgcccgatgcattccgggctcaatgatgaaagaagccgtctgcggctcgtaactgccgcctccgtactgtccgcgcgggccgatgtccagccgttcttctccatccacggtcaagttagccagatcgtcggcgcccatggtcaccttgcattcggccgtttcatcaggccccagctccctgacttcaaaatcccagtcccagcttctttcaaaagcgtccgttggcgcttgttcgtcgatcgcggagggagctccgctattggaattgctcatgcccgtcagggaattgacatcgttatcaaaggattgttctttcatggtttgaatcggattagctattgaaacgcaaacattgcatcatcccaatcttggaaaaactgcaataatttttatccgttccttatccataacaacaaaacctcctgtttcaacacgtccaacacgggatgccccctggcctcagccgtggttcaataaatggtaaaaatttcttctctgcacttccgaatggaaaactctggcccatatggaaaattccggaagcaacatatccaaatggcctttaactgcgcgccatgaaacacggcaatttttcatttaacatggattcatgaactcttcaacggaaaaagcatgatctccctgaattggaaaagaaatccaaaatccataaaaacggttatcgcctgcgggcatgttcagcaaccccggcatgtctgaatggagagaaagcaggataaaccaccactttcccagcctccacgcctgaatttacaaggaaagctgctccttcaaacgctccagcagattgccgcaaccgtcctgaagcagttttaccacatattcaaagccttcctgccccccataatagggatcaggcacttcttcatccggaaaacgagtcgtgaaaaaacacatgggcgctatcttgcctgcccactgtccctttttatccaaccgtttcaaatcccgcagattttcacggtccattcccacaatcaggtcaaattgttccaaatcctctttccgcacggggcgcgacttaagccccggatcctcatatccgtattttttcagcaccgtcagcatccggctatccggagggcagccccgatggtaaccgatcattccggcggaatcgctctcaatcaaatgttccagaccttgttctgcgaccatttttttgaaaatgatttccgcggcaggagagcggcagatgttgcccagacagacaaacaggactcggtaaggttcgggagcactcatggacgtcatttctttttcaggataggcaggcggcctccccatttcaagagggaagagtttctgcacgggaaacggaaacgcccgcgaatatggcatggggcaaagaaagaaactgcgccgctcattcaaaaataagattctcctgtgtttcggcttgcgttaaaggatgtccggctgtagattatcgcatggcagatttccctcttggattaagttttgatgacgtgctcctgctgccccgcctgagcgcgattcttcccggcgacgcggacatcagttcccagcttgttcccggctttgacatgaaaatccccgtgttgtccgcggccatggataccgtttccgaatcggaactggcgattgccctggcgcgggaaggcggcctggccgtcatccaccgcaacaaccccattgacatccaggcggccatggtttcccgcgtgaagcgttttgaaaacgcggttatcccgaaccccgtcacggtcaacaaggacatgacgctggaagaagtccaccagatcatgatggaccaaggctattccggcttccccgtcgtggatgccaaccgcaagctggaaggcatcatcaccggccgcgacatgcgcggcgtggacgattaccagaatgtccgggtcaaggatgtcatgaccccccttgcccgcctgatcacggcggctcccaccacgaccattgaggaagcgcgccacatcctttacacccaccgcattgaaaagcttcccctggtggatgaacacggtgtgctggccggcctcatcacggaaacggacatccagaagcgcgccatgtttgcagacgcttccaaggatgaacacggccacctgcgctgcggcgccgccgtgggtgtgggccccgattatctggaccgcgccaaagccctgatttccgccggagcggacgccctgttcattgacgccgccacaggacacacgacccgcgtgatggacgtggtttccaacctccgcaagctgacggaccgtcccatcgtagccggcaacgtggttacggcggaaggagcggccgaccttatcaaggcgggcgtgcaggccatcaaggtgggcgtgggccccggctccatttgcaccacccgcgtcatctccggcgtgggcatgccccaattcaccgccattcaggaggtagcctccgtggcgcgtcccgcgggcgtcaccgtcattgcggacggcggcatccgctattccggggacattgtgaaagccctggccgccggcgccgacctggtgatgctgggcggactgctggcaggtacggaagaaagccccggcaaggtggttcattaccagggccgtcacttcaagcagtatcgcggcatgggctccctgggagccatgcgccgcggctccggcgaccgctacggtcagaacagctccggcaagctcgtcgcggaaggcgtggaagcgcgcgttccgtacaagggcatgctggcggacgtggtattccagctcatgggcggcctgcgctccggcatgggctatctgggcgcgcacaacctggaggaacttcgggacaaggcccggtttgttcaaatcacctccggcggcctgaaagaaagccatccccacgatatcaccatcacggaagaacccgtcaattattcctgttaactcctccctcacatggacgacaagcacctcgtagccgtcattgacttcggctcccaatacacccagctcatcgtgcgccgcgtgcgcgaactgggctacatggccaagctgtatgcgctggaagacctggaccagattcacgaacccggcgccgtcatcctttccggcggccccaaaagcaccacggacgcggacgccccggacattgactttgaatggctccaaagcctgaatgtccccgtcctgggcgtgtgctacggcatgcagctgctgaacatcaagcacggcggcaccgtaaaagccagcaacaagcgggaatacggccccgccgccctgctgccggaaacctgcgcgggcctgtaccgggacatgtccccctcctcccaggtatggatgagccattcggacacggtggaccatctggcggaaggctgccgcgtcatcgcccgcaatgcggaaggcgtccccgtctccctccaatggggagaaaccaccttcggcatccagtttcatccggaagtaacccattcccatgaagggcgcacaatcctgcgcaacttcctttcctgcgcggccaacctcaaaaaattcgacatcggagactttaaaagggaactcatccgggaaatccgggaacgcgtgggcgacaagcaggtggtctgcggcgtctccggcggcgtagacagcaccgtgctggccgttctgctgcatgaagcgggcgtgaacatgcgcgccatctttgtggataacggcctgctccgcaaaaacgaggcggaggaagtgcgggccaatttcgcccgcatgaacgtggaaattgaaacggtggatgcttccgaacgcttcctggcggccctggacggagaaagcgatccggaaaagaagcgccgcatcatcggaggcctgttcatcgacgttttctgggatgccgtgggagacgcggaaatgctcgcccagggcaccctgtacccggacgtgatcgaaagcgcctccaacgccaaatccaaggcctccgtcatcaagacccaccacaatcgcgtggaacgcgtgctggagctccaggcgcaggggaaagtactggaacctctggcggaactgttcaaggacgaggtgcgggaactgggcgcctccatgggcatcccgcatgatattctgtggcgccaccccttccccggccccggcctggccgtgcgctgccccggcgtggtcaccaaagaacgcttggacatcatccgggaatgcgatgccattttcatcggcaacctgaagaaatacggctggtacgacaaagtctggcaggcctatgccggcctcattcccgtaaaaacggtgggagtgaagggggacgaacgctcctatgaatgggccaccaacctgcgcgccatcgtgtcggaagacgccatgacggcggactgggtggaactccccccggccctgctgagggaaaccagcaaccgcatcctcaatgaagtaaagggcatcaaccgcgtcctttacgacatttccaccaagcccccggcttccattgagtgggaatgaagattattcctttggaaacatcggagcttaaaaggattattcaagttaataaaacttataaggaactatatccgattttcaatgaggcattcaattcgacacttctaccgcatgtgtggtgtgaaagttgtattaaaaattgcatttgattatgtgtacaacacggagcaatatatgtttagctttggtagctaaagaaggttagatatgctttgattattgtacaaatccaaagcgaaggatattcatatgaattatgaaaaaggatcagagtggagaagatgggaattacatattcacaccccaggcactcaaaaaaacgataattttgctggtgtttcctgcgatgataagtggaataaatattacgaggatattcatgcgtatattggcaatggagaagatccactaaaaaatatagctgttattgcaataaccgactatctgtccattgacaattacaaaaaagtagtagcagataggaatttgccgtctagtgttaagcttgtattgccaaatgtggaaatgcgaattcagccaatagccaatgattctcctattaatatccattttcttttcaatccggacattattgaatctgttgaagatcgattcttttctagaatcaaattcatatatgactcaactaatttttcagcatcccgaagtgaattaattcggcttggaaaaacaattaaacctgaattggatgatgattctgcctacataaaagggatagagcaatttgttccgtcatttgataaaatccaagagatttttgcaaacgacaaaaaacttagagaaaacactatcattttagtgtcgaatagcacaaatgatggggtaagtggtgcaataaatcactctgattatctggatgattttcaaggggacagtcaacttaaagcctttagacaagcaatatataaattcgttgacggtattttttcggcaacgccttctgatattgcttactttttaggtgaaaaaacaaactgtccagcagatttagtaattaaagaatgtggttctttgaaaccatgtgtccacggatgtgatgcgcaccaaaacgaaaaaatatttgagccagaccagcagcgatattgttggataaaagccgatcctacatttaatggattaaagcaaattctttatgaacctaaagaacgtgtaaaaatctctcaaatagttccagactataaggcagagtactatgtaatcgaaaacgtacaattcgttgataaagattttcaagttaatcccatagtattcaatgaaaatttaacatgtattattggtggtaagtcaactggtaaatctattttgcttcataacttagccaatgctatagatccatcgcaagttgaagaaaaagaagataaatcatcctctactactagaaatatcgaaaatgttactgtaacttggaaagacggaaaaaaagacgagacacgaaagatcgtttatgttccacaaacatacttgaataggttaagcgatgcaaaagaatcgacaactgagatagacagaataattgaagaaattgtttggctcgactctgatgttaaagaaaaacataatttgatgcttcaatcaataaaaaaatataaaattgcattaaatacaactatccttggattgattgaaaatcgcaaagaaatagatagtattaaaaacgaaaagaaagagatcgggagccgagcaagtattgaggctcaaattgagaaattaacctcccaaaaagacatcttgtcaacggatcctaatttatcaaaagaagaactaaattcatatgacgaaaccattacaaacatcgatatagttaatgagcaaattctttctttgcaaaaggatcttactaatattcaaaatattgaggctgtagttgaaaagataactttcagtttttctctctcagatcatattcaagaattattaaaccgtgcaacagacgatgctattatcgctgcaaatacaatttggattcaaagtaaacaagctataattggcaatatttctaaaggattggataaaaagaaacgtcgaaaagacgagcttttagaaattcaagatagcttaaaatccaaggtacaaaaaaataagattatctcagaactgtcaaataacatccaaaaagagaataaaaaactaaaatcgttaacggaaatagagaaaaaagaagtggctttgattgaaaaagaaaatgcgtatatttctgaaatttgtcaatcgatagaaaagtttaagcattttcacaatcaatatgcccaaactgtcaacggaaagcccgaattcaaaagtaatgatttagagttttctgtagaggttccgttcaaaaaagaagcatatgtagataaagttttacggcttttcgataatcgttctatagcactaaaagatactatttcaatagatagtttttcagaagatcaatatacggaaccacttttaagagattttattaataaaattcttgacgaaaagctacaactcaaaaaaggtaacacccaagaaactgcaatacgagaactttgtgatgactggtttgaaataaaatataacgtacaaatggacaatgataccattgatgttatgtcgccaggcaagaaagcgcttgtgctattaaagctgttaatagatttggcagatagcaaatgtccaattctcattgatcagccggaggatgatttggataaccgctcggtttttaatgatctgattccgttcattaaacgaaagaaaaaagataggcagattattatagttacacacaatgcgaatgttgtacttggctctgatgcagaagaggtaattgttgctaatcagcaaggaagcaatgttccaaacaagaagtacagatttgaatatagatctggtgctattgaaaacaacctgcctttgtctactgtgggcgaagaagcgaaattgggaatactaaactctcaagggattcaacagcatatttgtgatattttagagggtggtgaacgagcttttgaattaagaaaaaacaagtaccatatttgatgtcatccgaaacagcttccacaggaattgcatcatcatataaaatgtttgtggcaacgttttggcaacaaaaaatcagatagcctctactatctgaataatgaaagcaatacaaataatttgagtcaaatcccataaacaaaaatcaagaaaggagaaaataatgactgaactggaaaaatgcatggcgggcgaatggtatgactgccatgacaaggtgtttctggaattcaagaacaagacacaccggctcctgatgaaatacaattccctgccttacgaccataaggaggaaaagcgccaagtgctcaaggaaatgttgggcagcgtcggcaccaaggtatccatcggccattccttcatctgcgattacggccgcaacatccatatcgggaacaacgtcaccgtcaatacgggctgcacgttcgtggactgcaacaggatcaccatcggcaacaatgtgctgatcgcccctaacgtacagatttacaccgctacgcaccccattgatctggatgagcgccttactcccgtggaaacggatgaaggagttgaatacatccgccatacctacgctcttccggtaacaatagaagacggctgctggattggcggcggcgtcattatcctgcccggcattaccatcggaaaaggaagcgtcatcggcgccggcagcgtggtcaccaaaaatattcctcccgacagtctggcggcggggaacccctgcaaggttattcgtaaaatcaacggaagttgggaacaatgatcaagctgatcgcttttgatctggacggaaccataggggacacggtccccatgtgcatcagggcatttgaaaaagcggtttctccctacgccggccacacgctgagcgaacgggaaatcacacagactttcggcctgaatgaagtaggaatgatcaagaaagtcgccggagaaaaatggcgggaagctctccatgatttctacccggtttatgaaaaaatgcatcaatcatgcccggctccgtatgaaggcatacgcgaattgatagaaaccctgcaaaaggctggcgtgcttatcgccctgattaccgggaagggagacaaaagctgccgtatcacgcttgagcaattcggcatgcgggatttattctgttccatcaaaaccggagcggaagacaggcccaacaaggcggaagctattgaagagcttctgcacgacttccgcttgaacaaagatgaattttactatatcggggatgcggtttcggatgtggccgcctgcaacaaagcgggagtgacctgcttgtccgccgcctgggcaacaaccgcagacgtcagcggattgaaaaaaaccaacccctcaaaagtttttcccagtatcaaggaattgacattattcctgtccattgagaaataattagaagatcctcctcacttggataaggaaaaacatgatggaaaaatttcaaaaactggcccttctgattgatgctgaaaacatcgctctggataagcttgaaagcgtcattcaggaaatatctgcatatggccgtatcgtgattcaaagagcctatggcgactggagcaaggaaagtttaaaaaactggaaagactcgctaaaccggtttggtataaaagcggagcagcaatttaattatactcccaaaaaaaactcggcggatatggcgttgactattgacgccttggatttattgcatcagtcatcttacgatgccctcgccattgtttcgagcgactgtgatttcactcccgtttccctatatgtcagggaacatggtatttatgtaattggtatcggagagaagaaaactccagaggcttttaaaaaaagctgcaatgaatttattttattaaaaactgctgactctaaaatagataatacactacaaaataagccttcccaatctggatcagaaaaacgaaaaaaatccctgaatctattcataaattacttaaggaggcatttgaaacgcacaaaaaagaaggatgggtagccttatctcgggcatcatcttatattaaagataaacaacctgatttttctttaaaagaatactattccaaattttataaactcattcaggattttccggaaaaatacaaacttgaaaaatcgcatacaaaatatcaatgcaaataaaattatagagttatcttctataaccatattcacctgattccatcttggaacaggaaataaattcctgttttttatacgctcatttaacgcaaaaacaattctttccttccatggataccggcgccgtcatcctcacctcctttctctctaccattcccgtttatcttttctttgccacgggtttctatctgcgccacaagcaagtcatccaggcagaccatgacgcgcccatcatgcgcatcgcgatggatgtggcctacccctgcctcgtcttccacagcatcatgaaatacatggtgctctccggaaatgagacgctcagcagcgtttccttttccctccaggccattgcagcaggggcgctggaacttctgctgggtatcgcggccgcatggctggtcgctaaactgctgcgcatgcgcatcggcacgggtctgcgcacgttcaccctgacggcgggagtgcagaactacgcttttttcgtcatccccatcatccagatgctgtttaccgccggcaacgatcccacgctgggcgtccttttcgtccacaatgtaggatgtgagctggtcgtctggagcatcggcgtcatcatcatcgcaggcggtccgggcaacctgaacatgggcgtcttcttccgcggccccctgctggccgttatcgtgggcctggcgctcgcctggtccggcctgggaacctatgtagcccaaccgcccctgatgaagacttttgaaatgatcggcaactgcgccacgcccctgtgcctgatcctgttcggatgttccatgcgggatttatggcataacatgaagtgggaacccaaaccaatcatctgcggcctgctgacgcggctggggctggcccctgcactgctgctcctgatggcttatttccttccggtggatgattatatcaagcgcgtcatcatcatccaggcggccattccctctgccgtcattccggtcattctggccaaacgtttcggaggccatccggacctgggcactcaaatcctgctgacaacgacggtggcttccttcctcacactgccctgctggctggctcttggttccaccctggtcgtaccattgtattaacgggataatggcaacatcaatcctcggatgacctggaacagcccgctcgcccaacatcttccgcttttccggaggagattctattcccggtgtcccgccccttgatggaaataaaaccagtccgcaggattcggcggcggaacaatttccctgccgaaatatccgcatcctttctgcctccatactgcattccatgctgaatgcttccctacctttgggttgactccccagtcggatatgtattgaatggattcatgaaatttcctgctcctctctgtgccgccctgctgccggtcctgttttcctgcgcggagcaggtttcccggattgaacacgttcgggaggtgcccttaaaaaccacggtggttcctgcggaagacgtaggcatgcaccgcactcaggccacctatctgctgcatggcgccgtctcccagcaacagcgccttcagcgtctgggtcaatactacttcgtcacatggaacgatgccaatccggaacaggcggcaaccctggtcatgatgtaccgccagggaaagacaggttcaaccgtcctgacaaaatccatttcctatccggccgggagaaaaggcggcacgcaaaactccgttttcgaattcatcggggatgaggccagagaaaaaggggaaatcctcgcatggaagctcgtcctgaaggataaccgcggcaaaacgatttccgaacgccattcttatctgtggggggacgatcattgactcttcggcaaaaacaccgaagagccagtaaaatcagccggatatgaaggatgagacctgtagtttccggcaatctcgccagccaaggcatggccgcgccagcctccaacttcgttaataatcctccggaatatgggcacgcttacgcttcctgccgtttggcacggcgtttgcggacagcggcggcaagggtttccagcacttccactgtcgtctcccacccaatgcattggtccgtgatgctcttgccgtacaccaggtcggaactcaacggctgggctccttccacaatgttgctttcaatcatcacggcaacaacctgttcggacccgctggatatctgttccgcgatattggcggccacagccggctgtttgcgataatccttgcaactgtttccgtgggagcagtctatcatgatgcggttattgatgccggccttctgcaaggcttcttccgcttcctttacatgatcttcatcaaagttcggccccagggaggaaccgcgcaggatcaggtggcaggatttattgcccgtagtggaaacaatggcggaaactccctgcttggtcacggaaaggaagcagtgcggacaggaggaagaaacaatggcgtccacagcgatttgcaggctgccgctggtgccattcttgaatcccacaggcatggaaagcccggaagccagttcacggtgtacctggctttccgtggtgcgcgcgccgatggcgccccacgtgatcaggtccgcaatgtactgcggcgtgatggtgtccaggaactcggtggccgcgggcacccccatgtcccccaggcgcagtaatagcccgcgggccatgtgaaggccgcggttaatgtcaaaggtatggttcatgaacgggtcgttgatgaggcccttccagcccacggtggtgcggggcttttcaaaatacacgcgcatgatgatcaccaggtccttttcaaagcgcgccatttgttccttcaggcgggaggcataatccacggcagcctggggatcatggatggagcatggccccaccaccaccagcaggcggtcgtcgtggccggaaatgatgttctccgcattcttgcgggtcgtagccaccattttggcaatctccgtggttgccggataatccttgattaaaatggcgggggaaatcaggggctcaatgtcttgaatgcgtatgtcgtctgttttgaaccagttcatgtctggggcttattgagaggtttttgagagaagttgaaaagaaaaaaatacagtttgcaggctttatgcctgaatataccgcggggcttcacggccataagccggaagccccgcaaaatgaagcggccgcgcctcccgacaagaggcgccgtcatgcattaccaggaagtcacattgtcttccgtcaattccggattgttgatatggccgtccgccgtgctgccctgcttgtccttgccggtgctgtaaacggccacgttcttggtcaccatccgggaacctacctgaacacggggagtacggtcgtcagggttggcattcaaaatgatgtaatagggagattcccaaggatccatcaggcccacacggccgcggctttcaaaaaacaggccgggagcgccttccacatccgtagtcgtcgtattgaaataagccgttttcttgggattcaactttctgtcctcatccgcccggtccatataattggtcaggatgctcatgatgcggctatcgtcgtccacggcggttgtcacgtaatactgtccgtccttgtgggcctgcttggtcatttcccggctgctccaggccacgggaacgcggccgttgtccagcatgtaattttccacagccgtctgcagaccgttgcaatcgcttcgcgccgtggtaaccttggatttttccatcacgccgttcaccaccgtcatggcgatgccggccagcgtcaggataatggcaatcaccacaagcaattcaatcaacgtgaatcccttggacttacggttcaaaaaaggtgtcttcatactttgccaagagtagcgcaattacagttcagggcaagcggaaaacaaccggcgccgcctatttcaaagcctgttcccggaacggcagcagacggaataaccccggtgcacaaacaccccggcgccttccggcagccggggtgtttaaaaagaatgctcctttagttggaggggacaggggtttctgcggaagcaggggccggagcctgagaagaagcggcttccgcctcagcggcgcgcctgcgcagctcctcctgctggagttcttccggcgtcttggcgggaacggaagcttcctgcctggcggcagccttcatcatttccgggctcaacaggctttccgaactcttaacgtgctgccggttgatcagcatgcccagccccaggcaaagaaccatgaacgcggttccgaagtacaccgtggcttttttcagcacatccgtcgtccgggcgccaaaggcctggtccgtaatggctgcgccaaaggcggctcccagcccttcctgcttgggcctctgcataagcactacgcccagaaggagaagtgatacaatcaccaaaacggcaaaaagcaactgaatgctgatattgagtgaatctgctaaaaaaaggttcatgagcgcggggagtatgtgtgaattcgaacggtttgtaaagtctaggaaatgatttcgttatgctcgttgcagacgattttcttggggatgatgggcttgtccgacaaggcaaaactcataatgaccacccgttcgcccgtcttgattaaatgggccgcaccgccgttcatgatgatgttccccgtgccggcaggcccctggagagcatatgtttccagacggttcccggacgtgacggacgccacgagaactttttccccgggccacaaatccacggcggccatcaaatcggcaggaatttcaatactgccttcatattgaacatcgccacgggtaatcatggcgcgatgaatttttgattttaactgctcaaccaacatgacgttcgaacaacaaacccccgatcgcccctccggtcaagccgtcatcctccattttacggttttctgtgtcttactccccctcctccagcgcttccgcggcatgagcggcatcccgggcaagctggcttttcaattcttccaaagaggggaatttgatttccggccttaggaaacggaccggttccacttccatctcccgcccgtaaatattccccgggtggccgaataaatgcgcttccagcaaaagttcccccgtctcaccttccacggtggggcgcacccccagattggctacgcctccgtattttttgccggccacccgggcgcgcacggcgtaaacgccatggggaggctgtaacccgcaaccgggtcttatattggccgtggggtagtccagcaggcgccccagttggcgcccgtgaatcaccgggcccttccagcggtagggacggccaagcatgccggcaacctgtaaaaaatccgcctcgcgcacggcttcgcgaatccgggtactgcttatgcgctccccgtcccgcagaatagaaggaacggccgtcacccggaacccgtagcggcaggacagcaggcgcagggtttctacattccctgccctgccgcggccaaaatgccagtcctctcccacggcaatctgagccacccggcaggaggaacaaagttccccaataaactcttccgggctcatggacgccagcctggaagaaaattccagcgacagcaccgccttcacccccagctcttccatcaaggcaaatttttcagcatcttcccccatgatggcgggcggcacgctttccggcctcacccgggccagcggatgggtgcggaatgtcagcacggcgggaattcctccgtcaagagcagcccctttcaccgccgcggcaatcactccggcatgtcccagatgcaccccgtcaaacatccccatggcccagtgtacgggggcggcaaggcttttcaattccttgaattcccggtaaatgaccatatgctacccgacaatcagaatatccgccagctccttcagggaaagcatggcccggaacagttcctccctgggcgcggttttcagggtgtccaccgtaatggcgcggtccagcgtaaaagaaccggacctggtgcgccggagggcgctcaaatgcgctccgcagcccaatgccttcccaatatcataagcataggaccgcacataaaaacctttggaacattgaacggtaaaatccacttccggaatggccacgcgtgaaattccgtggccaaacacttccacaggccgcggctcccgcacaatttcctgacctttccgggccagtttgtacagcggcaccccgtcctttttgatggcggaaaccatcggaggaatttgttcaaaagctccgtcaaaccggtcaaacgcttcacgcacggcctgttccgtcactccgtctacggaatactccgccactatttctcccatggcatcctgagaggaagtttccacgcccagcataagggttccggcgtattccttgtgttcgcacatcaacttgtcctgaagcttggtcgccttccctaccaccagcatcagcaatcccgtagccatgggatccagcgtgccgcagtggcctattttcttaattcccagggaacggcgcgcaattgccaccacatcgtgggaagtcatgtcccgcgccttgtcaatcaacaggacgcccgaaggaacctggatggaatctgaaacattcatgaaattttctgtcggatcacgcgttccacttcttcccgcatggccttcaggatagtaaggcgcacttcttcaataggcccccggatacgcactccggcggccatggaatggccgcctccgccgaaacgggaggccagctccgcgacggatatttcaggcgtcttggatctcagggaaatacggatgcggggatcgtcctccgtttcttccagataagcggccagccagactccctgcacggaacgcagaaggtcaatcaggccttccgtatcttccggacggcttccaatccgggcttttgcctcattcgtcaggcaaaacgtgcaaatcctgccgtccggcgtcagcttcattccgttcagcgcctcacgcatcaactgcattttcacccacggcttttcctggtaaagctggcggttgatgtcctggacgtcaacgcccatccggatcaaatccgcagccagttccatgacggccgccgtcgtcatctggtactggaaagaccccgtatccgtgctgacggccacgtaaagggcgtctcgcatcaccggagtgacgggaacgcccagatacttgaaaaagtaatataaaatcgcccccgtggcgcattcgtccggcaaaacgcactgaacgtctccaaacagatcgttcgtccgatggtgatcgatgttcgcccacaccttcactcccgccaaagcctccaggctgcgttctcccagcctcttgagcgcgccgttatccacggaaatggctacttccacatccaccggctcatcaggcgtgggaataatattttccacacccggcataaaggccagattggaaggcaccccgtcctcgttcatcatcaccaccttctttcccatttgcttcagggcttcccccaaagccagcgtggagccgatagcgtcgccgtccggatgaacatgcgcaattaccgcaaaactgccatggctgcggatcagatccgccaaaggcgcaaattggggacaatgtttccaatcttccatatgtactgccgtgtttttatagaaaaagccgcacctggacaatcaccaagtgcggcttgaaaagtcgtacttaatcccggaagaggattacttcttggacttcatgaccaccggagccacatccacggcgggctggttcaggtcattgaacttgggcaggggggtcaggggcggagcaccctgatcctggcagcagcaggaagccatgatgctcgccgcaaaagcggcaagagccataacggtaatcttcttcatatgcgtggttaaatgatgggtgataaaggatatggaaatatcttggagcataaaagcataccatgcgggcgcccgtcaatcaaatttgcgaaaatctcccaaggagacgcctttcccaaaatggcaagacgcataaatcgctcgcccggggttatctgtaattataatctctgccaagctgtatccttttcatgcccttttccgtcaaaatactccggtttttcggcattctcctgctgagcctctgcgcgctcggcgtggccggcatgacctgggcgtacctgatagaacccaatcttctgtttgtcaggaaagtagactaccgtgtcccccagtggaaagggaagggaacacccgttaaagtcgttattgccggcgatttgcacctgatgcccaccgcgtttgatgaagtgagggccctgcgctatgttcagaggatcatgcggctccggccggacctgattctgctggttggggactatgcccggggaagcagcgaaaacgccagcatggatcccgccacggccgcccggctgctgaaaggcctgacggctccctgcggggtctttgctattcagggaaaccatgatttcaccttcggctggaacaactggagcagggaactgaaacaggcgggaatcaccgtgctggaagaccagagcgcgcttgtcacgttcaaggacggaaggcagcttcagctttccggaatattggatacgacgcgcaatgtcagaaaacggctgcccaaacgccagtcgccggacatcccccatttcctgctttcccaccgtccggaaacggaccgcatactttcccatggagacgtggacatcgtcatcagcgggcacacccacggaggccaggtttgccctcctttcggcctcctgcggtttgaagccagcccggaccatgccctaccctacacctatccctggcatatctccggcggcaatacctacctgatcaccaaggggctggggacaagcacactccccctccgcttcaactgcccgccggaaatctatctgctggaactgcattgacccattcctcccgttaaaaatacagtcccttccttcccggtgccctccccctccgctccacgccggcggcaatccataaagaaaacggaaaagaacggccgggttccatagtttcaaaggagccggttatcaaacccttccttcagccttaaaatctttctggccgtcatccggtaaacaggccggtaaaggtgctttttcaagacggccgggagcgttcttccgggcagcggaccgcgcagcagcccggcttcacgcataacccgttcgtaacgttccccttcataacgccaattataccgccagggcttgtgcaccccctggtaatgaagaatgcccggttccaaagccgcttccaccgcctggcgtggcgtaacgccgcgccaaaactgttcccggggatcgtttttcaaaatgcggcgcgtcaagccgtcatgccagttccagcgcgggtgcagcggcacggtcagctcgcacagggctccgttcaaggcatcctggtccggacacgtcagcctgtcccggtgagtgacggcataatccagcacagccctgaccagattcctctcccggaagacatccacattcatcagcagcacgccggaattgaaatatcccgtgcaggtcagcggcatctcaagacgttcgttaaaatgggaaccgggtctggaaaaattctcaaacaccacccctactgcttttccgtccatattcgtccggaacagctccgtcaaatcccggcaaaccagaacgtcaatgtccagatacagaatattgccctgctcttccttcaataattccgggatgaacacgcgtccccaggctggcaccggccattgttccgtatggggaaagtcgtgctcttccaaaatgccggaaacgtctatgaactccagacggcaatcgaacggagcggccagccgctccacgcttgcccggttctctccgtcaatgccgtcggaaagaacgtaaattttgtaaaaagtctccggaccggcagtattcagcaaagaaaagacagtaacgctcaaaggcaggatgcccctgttgtcactggccaggacgacggcaaattcattctttttcatcggattattcattcgggtgatgtcagcggcgcagcaaccgggctcccgccttgcgtattttcttccagtaataggaaaagtccaagccggattttccgcccatccaggttttcagcaattttccttcccggcgggacagactggaatcatcctctccgggacggtacagattttcctgacaaagcatatcggccaccttccgggtaacctccttttgaacggcatgaggggcgtatttgcggatattcctcacgcccattaccagcattttcaaaaatgccgtcctgtattcctccagaattccggcttctttccattccttcagcaccagctccgccaccgtcaggtaatccagcgactggagggaactgccggacgcaaaaccactggtaatggacccggcccgcttgcggtaaacgtaagccgccctgctgacgacgcaaactctcctgcaccacggaaaaacggcgtaatggaaatacaggtcttcacaggcaacgccccaggggaaccggatgccatgcttttccacaatggaacgcctgatcatcatacctcccgctccatgatgtattttcccaatggtctccggagagcagggaatccaccccttttccggagaggccatatcctccggcaggaaccggtcttccctgtcggggtcggcctcgtaataataccggaacccgcataccagcttgtcggcatccagcgccttcgcacgggaatacatctcctccagcaaatccgtctccagccaatcgtcggaatccaccaaaaacagatattctcccacagcatggttcatcgccagattccgggaacgggataaaccgccgttttccggggcctgcaccactttcacccgcgggtcccgctccgcgaattcccgcagaatggacagggagccatctgtggaagcgtcatccacgcaaactacctccagttcacgaagcgtctgagagcaaatgctttccaggcactgggccaggtacggctccacattgtaaaccggaaccagcacggaaatgttcacgggagccgtcataagccatgcggaaaatctgccgcccttatttgttcaaatccttcctgcggcggcagaaaaggctccagcgcggaccatacctggtccactgtaatttcctcaatggcgccgggggaaaccaggttggaaatgcaccgcgcagtaatggcggagttgcgcgtccggtggcagaaaatggcggtcacgggcaccccggcataggcacacatatgtgtaggccccgtatcattgcctacacaagccagggaacgcaaagccatctggggaatatccatcagggaagacttgcccagaaaactgacagccaggggagaactggcggcaatggcctccacttccgcagcctccgcccgggtgccgatgacaacggaggacacgccccgcgccgccaggcgtttcgccagggcgcagaaattctccacgggccagcgcttgtagggatggttgggggaacagcccggaatcatcatcacataacgttccggaagctcgtcaaaatgcagcccctccccgtgcatgaaagaaagatccgtcaggacgcgttccaaacggaacggctcccgttccaccttcccccaccggaaggatttctttttcagcaatttgcgccgttctccggaattgcaggccacccagtccatgtcatggttcagcaggaagcgcacggcgggataatagcgtttcctggtgcgggaagattcctgaagatcgtacaccacgtcaaaattccctttcacaatggaacggacggccctccaggtggcgcccagcttccagtaaggcaggcgattatccacaataaaatcgtcaaacactccgagctgctccgccatgggaacaaacattcccatggtcatcagggtgatatgcgcctccggatgaagttcgcggagccgcttcatcgtccccatggcgagcaccacatcgccaagggctccatgcttgatgatcagaatgcgctgtgcgggcatgggagaaaaaaggaatgcgggttaaacgtaactgtcttccctgtccagatactcctgcacgtaccggcgcacgccatcctccagggaagtcatgggcgctgcataaccggcagcgcgcagcctggaaaggtccgcctgcgtataatactgatatttccccctgagctcttcaggcatctcccggtaggcaatcttttcctggaggcccagcgcatggaatgccgccttcgccagatcgtggaaagagcgtgccttcccggaacctacgttgaacaggccgctcacctccggatgctccagcagccaaagcaccacgtccacgcagtcgcccacccacacgaaatcccggagctgccatccgtcacggtagtcgggatggtaagatttgaacagcttcaccgtttcattggccttcacttgggggaatatatgggccaccacgcttttctgcccgcccttatggtattcattagggccgtacacgttgaaaaatttaagcccggcgtattggggaggaaccggacgcccttcttttacttcccgggccactttacggtcaaacagggccttgctccagccgtatgcgttcagggggcgcagcgcgttgacgtgctccagggaggcgtcatcgtcaaaccccatggaaccgtccccgtacgtggctgcggaggaggcgtaaataaaccgtttgccgtacagggaacaaaactcccacaaatgccagctcaacgtgaaattcgtccggataatcaaatcggcgtccgtctccgtggtggcggaaatggcccccatgtgaatgaccgcctccacctcatccgcatgcgccttcatataatcaagcatgccttccggagaaaccacggcgcacagctctctcttggcaatgtttctccacttgtcggaagagcccagctcgtccaccaccacaagatcctttttaccggctttttccagagcggcgacaatgtttgagccgataaacccggccccacccgtgacaataatcataagaaaagaatcaataaaaaagttgtacggccttttgtaccacatccacccgtccctaggcaactgccatttgagacgttccccggctcccaattttcaacgaatttacaatccggacactccaaaccctgaccgttccatgcggaaaaccattgggccgcaatccccgcgcagcttgcggagggagcgcccctcaaatcctcttttcatactggcaacgttaaaaaatttcggtaagacctgtcttgcaaaaattatcattgaccacggattgtaaatccgttacacacattcccacccctatgatccccgatgtttccatcattgttccctgctacaatgtagccgcctacgtggacagctgcctggatagcctggtacgccagactctccggaacattgaaattatctgcatcaacgacggctccacggatgagacttggatacatctgctgcgctggaaagaaaaggacagcagaatcatccttctgaaccagcggaacgcgggcgtttccgcagcaaggaatgcagggctggatgccgcccgcggcctttatgtcggctttgcggatccggacgactacatggatccggaaatgtattcccgccttttttcggcggctctggaatatgacgcagacattgtggaatgcggaaaccatgtttttgaagactcgtcagaccggcttatcgaagccaaaagaagatcaccctcccggcattttgaagagaacgcctctccggccagcttcttccgggattccatctgggggaaaatggatatctgcgtgtggagcaaactgttccggaaaagcatgctggacgcccaccgcctccgcttcaacgtacatctgaaatccggcgcggaggatgaaaccttccggctgatggccgttccccatgcctcccgtctcctgttcattcccgactgcctgtattactaccgccttatgcgcaacggctccctctcccgccgctgcaacgttcccacctactccaaatgcgtgcaggaattccagcggctgctgtacattgtggactactggcagaaacaaggatggcaaaatgaaggactgttcgcttacggcgtccggaaaatcaggcccttttttgtttccaagcatccccttttccatcaaatgaccgctgtccagcaacgttctgcgctgaacttatggaagctgttctaccagaaagcggaaggagaacgtttcctctccgcgctggcgggacgggacaggcaactggcggacctgctgaactcggcggaaccggtccccaacggctgggggcgcattctgctggcagcctgctccctgcttcccggacaaaaaggacgttattactcctgcaaaaaaatgcttgcggaacatttttcccaagtctgccccaatgggtttcaaaaagaaaacgcttctctggaagagccgtttgacacatcgccgccttccctgtaaattgccttatcctcccattccggatcaatgaaccgttttctctcatttgcagactcccgcatgtcggccgccctggagcggctgggcaggcaggcggaagcgctggatttttttgatgagatcacgctcttcacggaacacgacctttccgcagaattcaccagccgcatgggccggtacctgacgccgtcctgccggggattcggatactggtcctggaaaccctggtccatccaccatgtcctccaagaaatggaggaaggcgaccgcctcctttatctggatgcaggttgccatatcaacgccaacggaacggatcgcttccgggaatacgtaaatatgctggaccgcgacagccgcggcatgctggttttcaccaacggacagccggaatacaaatggaccaaaggagatatcttccgccacttcggcgtttcccaagaagacgggcatatcacgcatacccagcaaattgcgggcggccatgttttcctgaaaaagaacccgctcacggaaagcctgatccgggattggctccatgtcttttacgaccatctgcatcttgcggacaacactccttccgcctcccccaacctgccgggttttgtggaaaaccggtataaccagagcatcttttccatcctatgcaaactgaggggcatcaccaccctcgacggatcggaaacctatgcggaaaactgggaacagctctccttgtttccattccaggacagacgggacatgggaatcccacgggccgggaaaaagggatggctggaaaaatgcaggcagctccttctttcttccaaaagaaacggatttggaatccggtaaagcttccccattcggaacaaccgggctgcacgacgtttccaaacggggcaatctgacgcaccatgaactattttcccgtccttttccacagcttcatcccgagaattcctttccccttcggctgccgtttccggaatgtaatgacggttatttggacaagctcttttcatttgatcaggaatgttttgccttcatgaaagcaaacatccctccattccaaaactccgcacccgcactatcctccgccgacattctcccacccctattcacagttatgctgtcaccggaatccggctttcccccattcataccggaatgaaaataaaaaggccgtcatgctgggaacagcctgccgcagttcatggaatactggcaacctggatttcctcaaaacgtttttctttcagatttgtaggcttgacggcggattccaaatcctcatactttcctatgtggcttctcctcaatgccgaacaatatttcaagtctcccatagcgtctcggccagctccgccccttaccggttgagcgacgctctgaaccggcatattcccggcctgaaatccaccctgctgctccggaggcgcaaaaaaattgacggcctggaaatccacaggacacccgccagaagggctacggacgccttgcgacgccatctggcccatggatttgacattctgctgccggaaagaagaaaagacctgcctttctccctgaacgtgctgggcatgggatttgacacggcccaaatggaaaaagccgatgtggtgcatctgcactggataggcggcagaaccgtggatttctcgcagctgcgccatatccgccgtccattggtctataccctgcacgacatgtttgcctgcaccgcgggatgtcactgcaccatggactgcagcctgttccaaaacgaatgccgcggcaactgtccccagcttggcgctccccgcctcttccgcaacattccagcgtggctgttttcccgcaaacgccgcgccttcggccgcatcccgtcccttaccctcgtaactccctccctctggttaaaaagggaagtggaaagaagctgcatgttccctggaagaaaaatcgtacagatttacaatcctgtggacacggaccttttccgtccggcggaagaccggaatgccatccgggccggcctgggcatcccgcccggagcgttcgtcatcgcctgcggcgcaaccggcctgttcaatccggtcaaaggcggccatttcatccccctggtgctggaggaactataccggcgcgggcaccggaatcttcatctcctgctcttcggcaaccaggaaaaaagcgtggactaccccttccccagcacaagcgccggattcattacggacatgaacaagctggccgggctttacagcgcggcggacattttcctgaaccccacgcttcaggatgtcctttccaacgtagcgctggaatccatggcctgcaaaaccccttccgttaccttccggacgggaggagttccggaagcggttctggacggaaggacggggctggtcgctccgcagggagacctgaaccaaatggccgcccactgcgaacggctcatccaggacggaaaactcctgcaaaccctggcggaggaaggccgccggcacgcggaacaaacattctcctaccccgtcattgccgcacggcacgccgccctgtatgaggaaacgctccgggaataccgttacgaagagtgaaaacggccggcgttcaactgacggactgcctgttcctgtacatccgggcgcatcttcctttgtcattgacaagaaaaagacgcctcatacactctgcaccgtttcaacccttctctccccatgaaaacgcttaaaatctcctttttacagtccactccggatttcggcagggaaggaatgcttcagcttctgaaaagccggtatcatgtggtggaagacgattcctattttgattacctggtcgccaccccctggttttacgtcaaccgggaggctttttacgattttctggaacgggcccccggccacatcaccgtcatgtacggctgtcatgaagccattgcgccggatttcatgctgtttgactattacatcgggctcgatacggtgcccggaagcgaccgcactgtcaaacttccctaccttcgccaccatttgcaggaagtgcacggcggaaaggaaggcctggatgcccatgctctcctggcctccaaaacgggtttctgcaacttcatttacgccaaccgcaaatcccatcccaaccgggatgccatgttccacaagctctccgctttccggttcgtcaattccctggggccccatcttaacaacaccccgggcgacggccaccgggcggaagactggtacgcatcctccatcagaatgaaaaagccgtataaattctccattgcctttgaaaatgcatggtaccccggctacaccagtgaaaaaatcgtcaccagcatgcttgcgggcaccattcccatttactggggaaatccggacatcagccgggaattcaattccgcctcattcatcaactgccacgacttcccaaccctggacgacgccgcggcctatgtgcaaaaagtggacgaagacgacaacctgtggtgtgaaatcatgtcgcgcccctggaaaaccccggaacaggaagcccgctttctggaagagacggaaagggaaacggtcaagctttacaaaatattcgaccaatctccggaagaagcgcgccgcaaaggtgacggaacatgggtatcctactaccagcgctttttaaaacgcggccacaggatgcagctggcatggcggcggctgaaaaaccgcctgcgccgctaaccaacgtttccgggcaattcaaccccatgccggatttcctctgcccgccttcccccgtccccatccacttccttccgcttcatgagcaaatgcttttctgaacccttttgttcaccttctccccaccaagccggagacgccatccacggaacctatttcccgcacattgacggcctgcgtactttcgccgtgctggccgtcgtcctgtaccatttgcaggaagggatctgccctggaggctatgcaggcgtggacatcttctttgtcatctccggatatctgattggcggaggcctcatccgtagcctgaaggagggaacgttctccctgacctccttttacctccggagaatcaggcgcatcatgcccgcctacttctgcctgattgcggccgtgctggctttcggctgcgtcgttctggactgcgatgacctgcggactctgggccggacggtgagatccagcgcccttttcatcaccaacacttacttcagcagaaccacaggggattacttcagcccggcggcggaagaaaaccctttgctgaacctgtggtccctgagcgtggaagaacaattttacctgatgattccgcttaccctgtggctgctctggaaattcagggaaaaagccgtcaaacccgttctatggggggcgctgggtctctccttcttcgccgccgccttccacatagggcatctggaacataacaaggccttctatctgctttactgccgcgcctgggaacttctggccggctgccttctggctctggctcccgccgcagaacagaaccggggaaccggatggctgcggacggcgggatgggccggaatcctgctcccatttgcctgctatacgccttccactccttttcccggatacacggccatcccttccgtcgcgggggcggctttgcttatccgttacgggaaccatggctggtccgggcgtatcctcaggcacccgctcagcacaggcatcggcaaaatctcctactccctgtacctgtggcattggccggttatcgtgtactggacgtacatctgcttcgacgaatgcgctccctgggattatgcgggaatgttccttctctcccttcttctgggtttcctctcctggaaattcgtggaaactcccttcaggacgaccgtctcatggcaaaatccccaaaaagcgtttctggccacggcagcagggtgcctcatgctgggacttgccggcgaatggctcaaatggacggacggcgcgcgggattactggcatgtagcggccaacaacatggaattccctgaatactggaaagggccggccttccctccctccttcggcatcacgcctcccgaccgggcggtagtggaaaagggaaacgccatccagcaccatcatccagagctgggggatgtgacggattacccctttgtcctgctgggaaaaaccgggcaggccccttccttcctgcttatgggggacagtcatgccatggccagttcccccgggtttgacgaggccgcccggcttcttcagcgttcgggcctgttctaccgcgcgcgcctgtgtccgctgagcggcatttccagctccggagactcctcttccctaacgctcctgcgcctgatgtacccccattgggaacacaatatggaactaatcctggactggctggaaaataccccccaagtacagaccgtattcatccacaaccgctggattgaactggtcaacaaccaccgggatacgcgcctgaaacaactggttgcagacggcctgcgccacacctgcgcgcgccttcggaaagccggcaagcaaatcgtgctgctgggccccgttcccgaatggactttcggcccgcgcaagctcatgcgccgcaatgccctgctgaacgccaaccggacagaccgcctactgggcggagatttcaacacgcggcagcgtccggtattcgccctgttggagcacatggaatccacaggcctgtgccgcttcattcccctccacggcaccttccataaaaatgggcggtggcaggcggaagacggcggccaattaatgtactgcgacgataaccatctttccccctatggggcaaaaaaaatggtcggcggcatcatcgaccagcttttcccgggaatggaaagaacagcagccaactgacggaagtaccgcacggaaaaacatccaatcctttgacattgacaaggcatgcaggccccctacactggcgccaggcagcaaagccttcgcgatggtcccggataaaagcccggaatatggaggccataccgcgtccccctattcaacgcctgtactcccatgacggattccccccgccccacacgcatcaaggtcatcagaaaatccatgaaggcctctccggatcaaacggaatccctgttgtggggcgactgcctgttctgcacggacgccgccatgacggattacgactgggttctggtatacgacgaatttcccagaactcccgtgggcatcatcaggaatgaaacggaaccccttctctgccctccggaccagactatcctgattacggtggagcccccttccatcaaaatctacagcagggcatacaccagccaattcggcaccgttctcaccacccactccgcccgggaccttccgcaccccgggcacaccctgggccgcggatgtcttgaatggctgtacatcaagcccatgcaggaaattctggaccagaaggaattcccgaagacaaaaatgctctccaccatctgctccgccaagcagcatacgcataccatgcataaaaagcgctatgatcttacgcgttacctggcggaccgtctgccggaactggactggttcggacacggcatccgggaaatagaaaataaaaccgtcgccatggatgactacaaatatcatctatgcgtggaaaaccatctggaaccccatcattggacggaaaaactgtctgatgcctttgtcgccatgacccttcccttttacgccggggatccgttggcaacggaatgcttcccgcaggaaagcttcatccccatcccgctggacaacccgcaaaaagcccttgaaatcatccgcaaggccatggaggacggagaatatgaaaaacggctccccgccatccgtgaggcaaggcgcctggtgctggaaaaatacaacatgttcgctcaaacagcggcagtcattcacaaccacagggaaacgggaaccatacggcccggagccatgctgaaaggacgtcacgtcctgcggaaaaatccgctcaatgcccttcgggaattggcagacaccctggcctataaaatcagatcgttcggcagacgcggaaccggccccggcgtgtaacctggattccgggcgcgcgccaacaggagggaacaaattccccctgccggtaaaaagaatgggcggccaatattccgccaactgccttgcggcagacggaacggcccagcccggtctgaaaccgattcaaaccggacgggaaacaggccattaaaacggaaaaaacttaatccgctttgcgggaagcgtgcctcttggcccgttcctcctcccgctgcttcttcaggtcttccttcatcttggccttctcttcggaatccagctttccatccttgttaatatcatatttttcaaggagagcggctttcttctccgcagaagtcattctcttgggagcgtcttcctccgccatggaaggcatggcgaacgcaacggccagaacaataagcaaatacttcatgattaaacggggttcttgaataatccttttctactcccgcacgtgccggttgtctctctttttttagcaatacatgcaaattacccggccatgccccttttccgccgcatgaactcccaccggtcaagccttcccgaacgggaaaaacagcggaatcaccacgaccatgaccagccccataatcacctgcaggggaacgcccactttcacgtaatccatgaacgtatatttccccgccggcatgaccagggcattgggcggcgtggaaaagggagaggcaaaacacatgctggtgcctacggaaaccgccagcagcagcggataagggctgatgcccatactcgccgcggattgcagggcgataggcgccagaagcaccgccgtagccgtattgctgataaacatggtcagcagggacgccgtgaaatagacgcccgccatcagggcaaacggcccgaatccccccagtccggccaccagcccgtgggaaatggcctctgaggctcccgtcttctccagcgctacggacatcggcagcatggcggcaatcaacacgatgctctcccagttgatcgtccggtacgcctcctccacattgcgcagacagccgcacaacaccatcaggacggcggcaatcaataccgccgccacagcaggcacccagttgaacaccatggccgcaatcatcagcagcataatgcctgcggccaggggggccttatgcgtcagggtcaccttggaggcctccgccagaggctggcccactacaacccattcaaaggttttctcactcaggcgcgcaatatccgtccaggttccctgaaccagcagcgtatctccgtactggagcttcacatccttcaaattatggaaaatgtaatggttgtctcgctggatggccagaatattgaccccgtacttggcgcgcagccccgaagatttcacgggcatgttgataaggtccgagttccgcatgagcagcatttccgcaatgcctatctcgtcaaacttcaatttgcttttcaacagggaatccgtatcttccgacgtcttccggttaatcatctccgccccatattcccgggcaaaacgggccacgtcctcaaactctcccattacataaatgacgtcgccccgggccaccctcgtatctgaacccgccatagtctggctgaccgtctgcaggaaggaatgccggccggaatgcctgcggcgcacctccacaatattcacgcggtaaaggtccggtatctgaagatcatgcagaggatgttccgtcagaggggaatcctccaacacccggaggcggtaaagattattaataatctggtactcatctatcaactggctgagggatttccccttggcttcgtgttccgccctgtcgtcatgacgtcccagaaatttcctgctgagggggatcagcaccaggatgcccgtcacgatgcagacaaggccgatgggggtgaacgcaaaaaagcccagcccctccattccggcctcctgaagctggttgttgacgacaaggttggggggcgtgccgatcagcgtcagcatgccgcccatactgctggcaaatgccatgggcatgagcaggcggctcgtctgaatgcctccgtccgcagccaggctcaccagaataggtagcatcagcgccaccgtccccgtattgctgacaaaggcgcctatgccggctgtaacaagcatggtcagcaccagcaggcgcaactcgctcctgccggccagtttcatgattctgccgcccatcatcttggccaggcccgtccggaaaatggcgcctcccaccacgaaaagccccaccatcatcaccacaatggaattggaaaagccggaaagcgcctgttccgggctcaaaatcccgaacataatcaggcagagcagggaacacagcgcgacaagatcagaacgaatcctcccttggacaaataaaacggcggatactcccagaatgagaagcgtggtcaacatagcaaaaacggcaggagtggaaaaatggcaagggaggatatctaacatgaccggcatgtcttgtcgataggctgaacaagtcattcacaaaaccgtctctccgccggcatccggcagaaaaaaacactttgtgcatcctgctcggagaaccccgcttcctctttcctttcccggtatcatggggatgatgaaacaataaaaaacgcgctctctgaaagaacgcgccataaaatgaaaagtggtgggtagagaaggattcgaaccttcgaaagcaaatgctaacagatttacagtctgccccctttgaccgctcgggaatctacccacttgaagtgatgtgcggcgaatgtataaggattcccgtgccttagcaagttttttttctaaaaagtaggtcctcccggaagcagaacccctatatgcaacagccatgccgccggaaggaaagcggatgcaggaacaaaaagtcggaaaaggcaatttttacgaatctcccacatataccggagcgcggctgtccggggaatccgcatccagttgctccagttggggcagaatgttctccatgctctcccatacggagggaacaatcttgattgcggttccaaaccggactgccatcatcagggcgtctgaagggcgggcgtccagctccaccagcttgtccatcacctcattggcagcctctatggtcacgcgggcataaaagacttcatccttgcggccgttgataagcaccagcctcacccggcattccatggcggataaaaagtgagccagcagggaagacgtgtccggccgtaccgggcgttccccgttcaggcagcgttccagggccatgccgtctgtcagctccatgaaaatgacgcccaccttgccggtcagcggatcacgcaggcacacacccgccccggcccgggtgtaaagcagggcgtaaggttccagagtaatcaaatgttcatccggcatggcgggcggaaatcacatgttaaaaaccgggattaataacccgttccgtatagcgggcagccaccttgacgtatttttccgcccatttgtggttattatccgcggattccggccccaggtccttcaccaccttggcaggagaacccagcaccagggaattgggaggaatgacggtacctttggtaatgagcgcgcccgctcccaccacagacccctggccgatgaccgctccatccagaataatggaccccattcctatcaggcaattatcctccaccgtgcaggcgtgcagaatcacgccgtgccccacggttacgtacttgcctacatagcagccgaaatcgtctgccaggtggatgcagctgttgtcctggatattggagtaatcaccaatgacgatcttattgatatctgcgcgcagcgtggtatggtaccagacgctggcatgttccccaatggtaacatctccaatcagatcagcgctttccgccacaaaagcggtatccgccactttgggccagaagttcgcgtaaggttctcttgccatataagtcatgtattaattgaagataagacagcattccagtctaaaaacgttcattccgcgggtatgccgcagccggaaacgaatacggccgaacccacccgagaatgaaaggccgcaggcacctccgcactaattttcttcccggatgcccttcttgctgttcttctcccgcttctccgcatccttgcgcagggagtcggcttttttcccattaccccccttttcataatacccggctatcctccgctggatggcggcttctttttttaccttgaaataatcgcccgatttagtccggatataccggttgtaggaagactccgcctccctggccagctgaagcacggcatcctgatcctgggaaacgtactcgtaatattgccccatcagcgcttcaaatacttccgcgcggcgagcataatccttcatggacttccggtacagggcagccaccccggccttgtccccgttttccatcaggagatccgcctgccgtttgatggcggcggaagtcaggtcgctgcgcccctcgtccgtctccttttccagcttcttcaaatcgcgggcaacatggcgcttattggtggaagcgtccctcatggggaaaatatactcatcttccacgcgggcggccatggccaggtaatccggacgggaacggaacttgcgcttaatcatggccaccagttcatcccattcttccagcttcgtgccgctctccgggcgtcccatcagcgcaatcaggcgttcccagcccagggggctgccgggagtggcctgtgtggcggcttccagcattacccgggcgcaatccggcttctgcatctcctcaaacaggtccgccagggaaagataatccagggaagtatccagccgggcgccattcaccttcttgtccataccctggagaagggtggattcatgctttgacttgcagttgtgcggatgggaaaaatgccccgtattatatccgtacccgccgtaggactgccaggtttcatccgtagtcagcagattgacccaggcatgcggcccgcggttgccgtccccggtaacataggcggagggaatgccgttgcatttggcggtattcaccgcaaaataggcctggtccatgcaaatgccgccttcatccagaatctcctggaaggtataattagtataagggtccttgcccagtgcggcgcggtccatccggtaacggatcatggaataggctccgccccatcctttccgggtaaggcgcacctttttgcgcgcccaatccatctccgacctcggcagacgcacatccaccacaaacaacagctcggaagggcttaatttggaaatgtccgtgagaagctcacgggcttcatccatctccatgaagtactcgaatacctgttccagcgtcaaaggcgtggtggaaatattggtggaagaagacgccctcagcttggacgggctggaagcgatgcggggattcagcatggcgcaggccagcgccagggaggaatacctgctccggggcatggcggaggttttcatccagaattccgcccacttcctcaaaatccctccccactcctccccgggtgtctgctcccgcgccatcgtgcgcaggaaaagtctcaggggatcggaagggtctgaaaaaagccatggatagaaatacctgggggaactctccttgatttgttcctggatagtttccgctcccactttgctgatgagctggtacagttcattggcgcgcacgaggtacgggctctgatcgtacatggacgcgtcaaatttgccgaatttgatgaccttcacggcatcccgttccagattggagcgcaggaaatcggcatacaagtcatagcggcccgtttccagggccagattgaaagcatccgtaaacaactttctgttggcggcgttattggccttcaggctgaccagaagaacaggcttcttgaaaatctccagccgcggatcttcctcctggaccacgggttcttccttcggttcctcaggggaaggctccgccacttcctgttccttgttccgccgttttccggcggcttcctcagcagccaggcgttccgcctcaagacgggctttttcctccgcctccgcgcgcgcccgttcctccgccttcctgcgcgccgcctccagttccgcggctttccgtacacgcgccgctttcgcttccgcttcctttctggccgccagctcagcggcggcagccttacgttgaacggaaacccggtggtaagtcactcctccggcggcaagagccaacaccaggacaatagtcataataattccgccggaagaggattttttatgcctgggaaaaccgggacgcagaggattgacaggattcatggggatgcagcttgaacgcgttgaagcaaattgggcaggggaatgagacggttttatccctgttccgtgtaacataaaagcgcaatacctttctgaggtcaacttgaaacaatggtcttttgctgaaggttcgttttcccggaacccgttaagaatcaaaccagagtattttttcttgtattttcatagtcattttatagtatcagacttcttcatgtctccaaaaacatgaaaaaaatacaagtatcctgctgattattcctggctgacatatgtttttcccgttgcctatgaacactttctctcatcttagtccgtttctggccgtcatttcgggaagcctcttctccggaacggccctctgtaacgacatcgtgctgcctcctccagataaaaagggaggaaagcccctcatgcaggttcttcatgaacggcattccaccaggtcctttgcagacaaacctatcccggtggaagtcctgtcctccctgctctgggcggcgcaaggcgtcaaccgggacgatcccgactatcgtacggcgccgtcttcccggaattccaatgaaatagaaatctatgtcgtcctgccgcagggctcctatctttacaagccggaaacccaccggctggagaaagtggtacagggcgacatgcgggccgctacgggaacacaggaattcgcggctaccgcgccgttaaacctggtctatgtagtagaccagtccaaacagccgggagactttgatgccaggagaaagctggtcacggcctgcacggatgcggggttcattggagaaaacgtttaccttttctgtgcttccgaagggctcggcaccgtgttccgcgccatgattaacgccaattatatccagcagtgcctgaagctccccgtcctcaaaaaagtcctgtacgcccagagtgtcggctatccgtcagaatcctgaaaaaaccataaatcggaacgctgtgaggctcgccgttccatcggcggctcttcctcatacctgcgaaaaaccgtcatgggaaccgctgttcccatggagataaaaacgccaggaaccgttgccggaccagctaggagcgcactcttccggacagcccagcaacaacggaaaaagcgtttgccgaactgctggatgaacgttttgggcaatcctggtcccgccactcccgccttgcagcattggctgaagaaatgttcaaaccggaattccagagaaactgcgacgccaggaaatccactccccgcttgcggtctttcccatagttcaaattcatgaaaaatccggaaccgcaagcggaaagcgcaccagcatcaccactggttgtccaggtttttggtatttatctttccgggttccttgttgcgttccttcatgccgcggacaggcttgggctccttttcgtgcaggtccagaatatcaatcacattctctccttttttcaggaatggggccggaacatacagccttaattgagggcccacattccaataccgtcccacgttgattccgttcacccatacataccccttgacatagcgggacatgtccagaaacgtgtcctgaggctcttcaatattcacgacggcccggaaatgcgctccttcccgtttctgggaaggcccctttcctttgggagcccgtaccatggagtcggctttcaggggaagcgccctcaccgtccagttctttaactcgcgcgttcccagcttcacaggaccgtacacccccttgcggtcactctccatgctgatatggaaattgatatgccccatggcctccaccagaatttccagcgttcccggcttcctgcgctccggcagcttcacactcttctgccccagccgtcgatccagcgtgccgaccagctctccatccagatacacctgggcatagtcattgacattggtaaattccagcgtttcaggcggtcctgccggaacggcagtgctgtaaacggcaatgccctgattctgattccactgttcgaaatagggaggctgcgggaacttgctccggaaaggcttgggcaggttctcccaaaggccggcatgcactgcgggcgtgaactccggaatttccatggccggaatgtctgcgggaggttccggcaccgcggctccggggggcaacttttccaagatgatttcccgcatctgggcataatattcattcatccgcccctgctcatccacgggagaaccgtaatcataactcgtcaggtccggctggtattttcccggccccccgttgttggctccggccgagaatccgaaattggtgcctccatggaaaacgaacaagctgaaggagcgtcccttgtccataaaccagcggacatggttgacaacgccaggggtgggggcccaattcccctccccccagtgccgcagccagcccggatacgtttccgaggaaaaaacgggaactcccggattgcatttattagccaccttccaatggccgtcattcaaccccggatccagccctacggccacgtccggaagcaccacccctttcagaaaatgctctcccgcgccgtcggatgtgtaaaaggggccaaaacccttcctgctccagaacgccttcagccattccatatacttgcggtctttccgctggtagctcccgtattcgttttcaagctgggtcatcagaatgggccccccgtttttggctaaaaaaggttccgccacacgggccacggcctccagataacgcgtttgcgccttcatgaatttggcgtcttccgtagttctcaatttggccttgggatccttcagcaaataatgaggcagccctcccaggtcccattccccgcacgcataggggccgggacggaacaaaacccacatgccttcctcctggcataacttgagaaacccttccagatcccggttccccgtcttaaagtcaaagctgccgtccggctgctcatggtcattccagaacacgtaaaatgcaatcgtattcagtcccatggccttggcggtcctgatgcggtgcctccagtattcacggggaatgcgctggggatgcatctccgcgccgcggatctggaatggttttccgttcagcatgaactcctggttcccttccccgccgaacccgaatacaacgggggttcctccggaaagagcgggtttctgtacattctggacagcctcagggccggcccatgccaatgctcccactccgacggccatcagggcggcagaccaactgaaaccatattgcttcatcatattgaacagttaattcatttgaagacggttgccaataacaatttttctctcttctccgaatctgcggaatgccctttccctccgccagaaatctgacggggccggacagcacgaatgccttccgttccgtggaatgtgatcatgtcatgtatcctcattcctttgtgcgaaaaccggagggcgcctgtctaaatttatcaatatgaaaacaattgtccttctgcgccatggagaaagcacgtggaaccgtgaaaacagattcaccggatggacggacgtggacctgacggaattgggaatacaggaagccaaccgcgcgggcgaccttctgaaagacaggggaatggcttttgaccatgcctacacctcttatcttaagagagccgtgaaaacgctcaactgcgtgctggaccgtttggaccaggactggctgcccgtctccaaaagctggaggttgaatgaaaagcactacggcatgctccagggactgaacaaaagcgaaacggcccaaaaatacggagacgaacaggtactgatctggaggcgcagctatgacgtggcgcctcctcccctggcggaggacgatcccgccaaccccaaatgggatccccgctataaggaagtgccggacagcgagcttccgcgcacggaatcactgaaagaaactatcaaccgtatgatgccctattggaaaggaaccattcttccttctctccggacgctggacaatatcctgatcgtagcccacggcaacacgttgcggggcatgatcaaatatttgaaaaacattcctgacgaacagcttctttccctgaatcttcctaccgccaccccttatgtatttgaatttgacgactccctgaacctggaaaaagactactttcttggggatccggaagaaatccgcaaacgcatggcggccgtcgccggccagggaagcgcaaagaaaaaaacgcctacagactaacctcacgcccccctccctatgaccgaccattcctgccgcattgcgttctttgacgccaagccctacgaccgggattccttcaatcctgtcaatgagcgcgaattccatgacgacatacgctacttcaaagggcatctcactccggacagcgtgcctctgacccgcggtacggacgtagcgtgcattttcgtcaacgacacggcaaaccgggaagtaatacggcgcctgaaggaaaacggcgtcaaattgctggctctgcgctgcgccggattcaataatgtagatctgaaagcggcggaagaagcgggactgcccgtcgtgcgggtgccccaatattctccctatgcggtggcggaacatgccgtggccctgatgctctccctgaaccgaaaaatacaccgcgcctactggcgcaccagggacggcaatttttcccttcacggcctgatgggctttgacatgaatgggaaaacggccggcatcatcggaacggggaaaatcgccagaatcctcatccgcattctcaaaggcttcgggatgaatatcctggcctatgacccgtaccctgaccggcgctttgcggaagaagccggcatcacgtacaccactctggatgatctgtatgcccggtccgacatcatttccctgcactgcccccttactccggaaacggaacacctgatcaatacggattccatcggaaaaatgaaggagggagtaatgattatcaatacgggacgcggcaagctgattaacacggaaatgctgattgacggcctgaaatcaaaaaaagtggggtctgccggactggacgtgtacgaagaagagggagaatatttctacgaagacaaatctgacaaaatcattgatgacgacaccctggcccgccttctttccttcaacaacgttatcctgacttcccaccagggctttttcacgaaagaagccctgcacaatattgcggaagtcaccctgcgcaacatccgggattttctggaaggcaaacctctgatcaaccgcgtcacgctccagtcacgctgaacgtgtccggcgggtatttcacggaaatacggaactttctcatcctccttctgccgggcagaaggagaaatccggggaaaggtggcagcttttttatgtaaaaaccaccatttcccgccgtattatacattatgagcactccgtcccctgcctccttcccggctcccaaaccgcactacgccgctctggacggcctccgcggggtggccgctgtcatggtagttctgttccacatgtttgaaggcagcgccagggacctccagttccatacggaccagatcatcaaccacggttatctgtccgtggactttttcttcatgctgtccggcttcgtcatcggatacgcctatgacgatcgctggggaaacatgaccctgtggaacttctgcaagcggcggctggtgcgccttcaacccatggtggtcatgggaatgctgttggggggaatcctcttttacttccagggctctgaaatcttcccgaacctcgagcaaacccccgtatggaaaatgctgctggtcatgaccgtgggattcacgctgctgcccgttcccgtttccctggatgtgcgcggatggtcggaaatgcacccgctgaacggtccggcctggtccctcttcttcgaatacgtcgccaacatcctttacgccgtgctcatcagaaagtttaccagcagatggctggcggtcctggtctttctggcgggctgcgccctcattcaccagtgctacacgcagggcaacaacatcggcggctggactctggatgcggaacagtgccgtgtggggctcacacggctcatgttccccttcttcggcggcctgctcctgttccgcctgtgcaaaccgggacggatcaggcatggtttctggtggtgcagcctgcttctggcgggagcgctggcggctccccatgtaggaggcgcggaacatttccgcctgaacggcctgtatgacgccttctgcatcattgtcatctttcccgcggtagtcttcctcggggccagcgacatccccggagacatttccgcccgagccagtcggtttttgggaaacatctcctatcccctttatatcacccactatcctatcgtatatctctacctggcctgggttcacgacgcggaagtccctctttcccgtgcgctccccgtggcggctggcgtcttactcctctgcattgccgtagcttacgggtgcctgaagctttatgacgagcccgtgcgcgcatggctctccaaacgcgtgctgaagcgacgccctccggaacccggggcgtaaagcggaacaaacatctgccttgccctggatggagccaggccggatactgccggcggtctttcatggaaaaactgccgacatccttcaaagctctgcgctacctgccctttcttgtggcatcggcattctttatgcaaatgctggatgccaccatcctgaacacggccattcccaccattgcccgcagcttcaacagccatccgctgcaactccactccctggtaacggcctatacgctcaccgtctgcgtcctgataccggcctccggatggatctccgacaagctgggctcccgccgtactttcctgctggtcatctctgttttttctgcggggtccctcctgtgcgccctttccacctccattcccatgatgacggcatgccgcgtcatccagggaataggcggcgccttcctgatgcccgtcgggcgccttgtcgtcctgcgctcctatccccgttccatgttcgtcaatgtcctgaacattgtgacgattcctgcgctgctgggtccccttctggggccggtgctgggcggcatcatcgcgcagtacgcttcctggcactggatattcctgatcaacatcccggttggcatggcgggcctgtgggccactcggaagctgatgccggacctgaaagcggttcgggaacagaaattcgactggcgggggttcttcctcttctcctcctccgccgtgctggctacaatgggcctctcctccgcgggaggcgtaaccgataagacgcgcatggccatcctcacgtcagccggaggcattctccagcttctgtactgggcgctggcgttccgttcaaaagcccccatcttcagcccggccctgttccgcatcagaaactttgccatcggaatcgccggcaacatcgtctgccgcctgggcggaagctgcctgccgtacctgatgccgcttttcttccaggtggtgcttggttattccgctcttcagtccggcatgtccctgattccgctggccctgagcaatctgctggcaaaaacggttgcgccgcgtctgctcgggaaatttggttaccggaacatcatggtcgtcaataccttcaccataggagcgctgctggcctccttccactttgtaggccccggaacccatgaacttattctcctgggcatgctcgcgctgctgggcggggccaactccattcagttcacctgcatgaacaccctgacgctgattgacctccccaatgcagacgccagcagcggaaactccctgctttccacgatcatgcagctctccattgctgtcagtattgccgcggccagttccttcatcttcgccctggtggacaaagacaagggaatcacccgcaaacggaaaaaagcagcttgaagaggaaaattcccgcccctgttcaggaacaggaagaggaatctcccgtctcaagagaacagcactgcgcaaatcgggcgcgggactcttccagggtaatcggtttcttatcctcccccagggctacataaaccagctccgcctctgtaattttggcaatgttattgcaaagcttcgtcagacgttccgcatatacctccaccttcacggtgacggaggtgcggcccaccttgataatatccgtataaaaggacactacatcgcccaccagcacaggagcttcaaacgtcaggctgctcaccgcacgcgtcacaatatagcggctcaatgcatagcgcatggcggtattggctcccgcaaggtccacctggctcatcacccagccgccgaatacttccccgctctgattggtatccgcaggcattggttccacgcgcagggcgggaacgcgcccttccggaagctgggcatgacgatatgtattttccataaataagaattattataaattgataaggacatgcttatctatcacagccctcttgtaaagggtaaaacgcggaagcggaaaacgggcggtgccggcacgctctgcggaaaaaagaaaacagcccggaataaactgctttcccatattgattaagttgggcaggcggatttccgtgtcttatcccggagcttttccaccatggccggtaaaggcggttgtccattactcatggaccgcaaccatgaatccaaaacaaaaaagtggacggggaggcacatcccgcttccgactttgcctacgtacccgatccggaaaagccttccacctggaaactgccgattttcaacatgcgccacgtaggaggggccctggccgccatgaccagcgactatcgcggcaaccccgtggaaataccggaaggagatcgccgtgccgtcatgaaaaaaatcctggccaggaaagcgaaactggaacaggaagaaagctgattccgttttctttcatttctttttttccgcctgtaaacaggaaggaaagaaatatcttttcccttcgttccccggtcttagccgtttggggacgggctgacaccatccagataccggctttctgcggcgccttcggctggcacccccgtagaaatgaaagacattcccacccttccgacgctcctggcggatacagccggatatttcacttacggacggcatcaaaaacggtggtaaaacagaagaagaaattaaattattctaaaatcatcaatcatcccaaggatgtttttcccctaaagtggattggggaaattcaggaaatctgaaaatcaaataactttctccggccaataaaaacaacatttagaaaattcctatataaataaatatcaatggcatattgaaataaaaacatgtctttccctgaacaggctgtccgaagcctggtcatcacgacaggaatgaagaatgccggaaaagggaatgctgccggctatttcccgcatggcagcgcttttccccttccgtcaactccgcatcaaaatatgactgacgaaaaaatgagcacagaaggcactaacgaaatacaggacccgcgcggcgaattccgccaggaaggatatgaacaacagcagcagaaagcccccggcctgcaatccgaaatgaaacccgtgccggattccggggaacaaagctaccatggctgcaacaggctccgtggacgaaaagccctggtcacagggggagactcgggaataggccgggcggcggctattgcctacgcacgcgaaggagccgacgtagccttgaactaccttcctgaagaacaaagcgatgccgaagaagtggcggaactcatcagaaaagagggccggaaggccgtcctactgccgggggacctcagcgatgaagtcttttgtaaaaaactcatcagggatgccctggaaaaacttggcggactggacatcatggccctggtagccggtaaacaagtggcggtggaagatatccgggacattaccacggaacaattaaccaagacatttgaagtaaacgtgttctccctgttctggattgccaaggaagcccttccgcatctcaagccggggacgagcatcattacctgctcctccattcaggcctaccagcccggcaagaacctagtggactatgcttccacaaaagcggccatcatcgcgttcagccgctccctggccaagcaggttgcccccaaaggcatccgggtcaacgtggtggctcccggccccatctggacagccctgcaagtaaccggaggccagctgcagaaggacctgccggaattcggacggaaaacgcttctcaaaagggcagggcaacctgtggaactctccggactatacgtctttctcgcctcccaggaatccagcttcattactgcggaggtctttggcgttaccggcggcatgcatctggcctgatgcggaaactcgcaatcctggaaaagggccggactgactttccggaatccctttccgcagcgccacacccccggatgaccgggaaagcggccggaaacggctctgcaaggaaatcagggcattgctccatttcccggttgtcccggcaaaaggttcctgcttgaatagggtaatggcattttggaggttttggttcatctctttccctttcacggcgcttctcttttccatggtgcatggcagtcctctgaacgcacccgtcatcacccttggagagaaaaaaagcctgttcggagaaaaagcgcagaccaatgaatatgtcagctatgccctttattactggccggatcccgccaatccggacggtccttacaaacctattgacggcaaaaagaacaaacggctccgcagcatggacgacagcggcaggatggccgctttcatcggcacggtctgcagcctgggacggcaatatgaactcggcaggaatccgcaagtcgcctcccgggccgggcaatggctgaaagcctggttcattgctccggcaacccgcatgcagccccatctgaaatatgcccaaattcgccccggacaccggacggaaggagacggaggaggcatcatcgacctttaccgcatgcccgaattcctggaagctttgacggcgttgaaatgctccaatgccctaacggcagaggaatggaagcaggtggatgcgtggctgaaccagtattacacatggctgactaccagcaggcagggcaggcatgcacacacgtgcagcaacaaccattatctgttttatgtggcgcaatgcgcccatttggcatccttcctgggccgcagtcatgaagcggcccaatggctggcggaagccttcgccaacatggaccgccacatcgctcccgacggatcccagcccgaagaactcaaacgggcggaaccctggcaatacagcgtttacactcttcaggcatggggatacctggtgcatcttgcagaacgcatgggcgataagaactaccgttaccggaaaacccccgccggggcttccattcaaaaagctgtggactatctcctgccttaccgctccgctcctgaaacatggccctggcagggctccagggcaaacactccgctccccgctatctttgaaccggagcaggagggcaggccacaacggaaatgttcctgaaccgcgcccgccgttaaaagcatccgtttttcctgcttattgaaaatcccctgtccagcagcatcacgaacgaggcattttcccggaaaacgatttaataagggatctccccagtatttttccccttagatttttcctttctttttgctgctttccattcccacggagatatgggattcgggtcagaccagatgcctttttgggcctttctggcatccctttcaagagaaacgagcttccggctggcggaaaaatttttataaatccacgcccatccttccttcaccatctcttcgttgacgaacatttttccatgccatatttcccctaaaatacggccgtacctgtcattctcggtataccggactgtaaccgtctctccccaaatcagcttttccaggtatttcttggcgccttcatccccgtcctgccccctttccggcgcatcaattccctcaagccgtatccggtgcgtacgcatttgttcaggcgtcttttccagaaggatgaccgtgtcgccgtcaatcacgttaatcacgactcccctgatactttcagcaaaagccatgcagggacttatcaggaaaatcaaaagccatttcatgaaaaatgatataatccaaaaaatatcaggatgcaactactctttagagaaaccgttcccgcactgttcacacggccggaaacagatgaatgcggtcatctgtggacagcctgttctggaacaggccatcatgttttccggcatgaaggaacacaattcccgaacctattccaacctgtccggaacaacggtaaacaggctgtatcattgccccgctccggaacatctttattcgctgccgtgccgggagcggaagaacatcccgccggcgcacccaacaatccaatcatgctgccatttagaaaagctgcatgttaaacaagaagaaccgggcgccctgcaacattcaatggcatggcgtgaggcatttcactcattttttcaattcttcggctattctgccgaggttcttttccgttgcctttctcagtttctcctgctgtttccagtaccatgccgttctttccgacaccccggcctgattcgccagccagcgcacggcgccgctcgtgtcacagcctgttttcttctgaatgacttccagcagttgagcgacatatttattcatggattccgggttgatattatttcgattcccatgcccggctgaattcctcgtcccggaacagggaggcaatcccgctgagctgcttgaggcgcaacaattcttccgcgtccatccccagatttttgagtatccacgcatccgacatgcccgcctccgtcaactcctggataatattggtcatgagggcgatattatgagatccccgggcacggttgtgcctgatggtggaagccatgcggtttccaagaggcttgtcgattacggccaccggcatcatgccaccctcccgttcgtaaatatcgcggtaagtcttcatgatctggcagcggtggaacccgtccacgatttcataggtcccgtcctccagcttataacaaacgataggcatcgtataaccgtcctccttgatgctctggtagagcagcttcatttcggggggagctacgctgttcgggttataggcattggaacgtatctggtccaggggaacgcgccggattttgtaaacgggggattgataggaggttttcataaaatattgcggtatttattgacggcggcccggcgccgggcaatcgctcccttggttggaccgaacccggcgtacttgcaaaagtaatcattcttcatgatgcagatgcacatgcgcttgtaggaaggcacctgccggaaattgctgaccggcatgtcgtcgggatagcccataaactgaatgacgtcgcggtcgacgtaacggcccgactttcccgtcacggtcgccagaggataggcggccagcacttcatcggcagttccgggatcgacggtgccccctttcatccagtactttttagacctctccaaaatgttgttgtagtgttccgccgttttctcgttcattgtggaaagcaggaattcataataggacttccaggtatggccgggcggcagtttgatggttttccagcccatggccgtcgtacctccgtacaaacccgtgaagttgacgccgttgacgcgcccgaccatgcgcgcccagttggcaggatcaataactttgtaaagcttcaggctttcctgggcgcagtcattaaacgggcttgccacccgcatttgcccgatcgtaaggcctgcctggtacaggagatcgtaaaggcggttatagtcaaaaccaaaacgggcgttggccgtccagacgtcgctgacgcgccagtcataaagagggtaggcgctgacggtcacggcatcagcccgtgtaatccacttccttccctcataagacgtccttttattgccgcgggcaacggcggcgtatctgttgaggctttcatccgcccgcagccctaccatgacggcagtgcttccgtgttttttggcaaaatggcgtgaaagcttatcctggaattcatagtccaccataccgtgccggaacgggacgtccagattcttttcgttgattacatagggattttccggcatgggtcgcacccacagttttttctgggcggcgctccacggcgtccagtaaggttcccccagggagcatgcggactgggccctgatcggcacacagtaccacatcttacgaatgccggggaattgctccagaaatgttctggtgacatactcggtcgtcatttgatattgggcctcataatcaaggtggtacatggacagcttgtccagaaggccctgttcggcggcgtaacgatagcaaagattaagcatgacgccgctgtccttgccgcccgaaaaagacaccaggacgttgtcaaactcttggaaacaataggctatgcgttctaaagccgcctcataaacatttttatccagatatgttttcacaacttttccaaagcctgtctttcgccatccgccgccagccccctgccggacgggaacacgtcggcccggatatgattgccggaagccatgcattttccctgaaaccactcttgcagcttgcagctcatagggatatcccctgttctttcaaacagggttgcaacgccttcatttctgcataaataagcaacatcatgttttttcatgttttcaaatgcgcagcagcttatcgtccgttattttccgtcaacaataccaacctactgaattattgcggcgggtcaatgtttttactgcaattatttcagtaattttattgtcatcaccctccttctcaaaatacctgcgctttttagcgagcaacaccattccagaaatgccttatgcattgcgccatgacctcctttccttctccgcaacatccgcgctatgtgcagcattcaagacgctgcgttggaatgcacggttccaaaatcggagatacaaaaatcataacttgcttaaaattaggtgaacgaaaaaatgtacgactcagagccattttccggttccaacatctttcccccaatactctttccggaaccgcatcttccaggcagacgatacatccatcatttccctcctgaaggaaaaataaccgtgtttccctttttgcaatccgggatgctgtccaaacatgaatatgccggtacacgccttaatcatgccgtcagattagactttaggcgttttatgattttccccgaaacgccaatttcatgccagaacggaatcaaaaaatgacatttagtcagcacttatggttgtttttccgcggtttttcacctttccagcctcaaaacagacaaaaaagaagccctgtaatccattaaaattacagggcttagaaaattagtggctcccccggttgggctcgaaccaacgacctagtgattaacagtcacccgctctaccgctgagctacaggggagtttgcgttccatggaacgcggagggatttttactggagagacaggcgtttggcaagtacttttttactcttgcaggctttttgacgcaaaaaggtctccgcgacgcggtcatgtcaacggtgttttcttgacctttgaagggagaatgaccagactttcagcgacatgagtgaacatcaccatcatattgctgtcctggccggcgacggcatcgggccagaggtcatggcagaggccctgaaggttctggatgccgtaagcggcaagtttggctttaccgtaagccgcaaggaggcttttgtgggaggggcgggcattgaccactgcggcaaggctcttcccgaagaaaccattcgcgcctgcgaagaggcggacgccgttctgttcggctccgtgggcggtcccaaatgggagcatctccccgccaatgaacaaccggaacgcggagccctgctgcctctgagaaaacatttcggcttgtatgccaacctgcgtccgggcgtatgccttccggccttgacccatgcctcccccatcaaaaatgaactgattgaaggcggattcgatattttatgcgtccgggaattgactggcggcctgtatttcggccagccccgtttccgtgaacaggagggagacgacgaagtcgtcgtggataccatgcgctaccataaaagcgagatggtgcgcatcgccaaagtggcgttcgaggccgcgcgcggccgccgcaagcgcgtcaccagcgtggacaaggccaatgtgctgaccaattccctgctgtggcgcgagacaatgattgaagtttccagggattatcccgacgtggaattgctgcatatgtacgtggacaatgccgccatgcagctggtgcgcaatccccgccagttcgacgtgctggtgacggaaaacctgttcggggacattctttccgatgaaatggccatgatttgcggttccctgggcatgctgcccagcgccagcctgtgccagggcgcgcaggacaacggcctgttcttcggcctttacgaaccctccggaggctccgccccggatattgccggcaagggcattgcaaacccgatcgcccagattctttccctttccatgctgttgcgctattccctgggagaaaaaacagcggcagacgccattgactccgccgttcgccgcgtgattgaccagggctgccgcacgggcgacctggctacgggagctcccggagaaatccgcgtgaatacggcggaaatgggtgacgccatcatcgccgccctgtaagcggggccgttcttacggcgccgcaggggaagggacacctgcggcacgcctttcctccggggggagcggtaccgccacccctccgctttcttctttcatttccgggattttccggttctttatccatctatcatgaacatccttatcatcggccagggaattgccggaagttgtctggcgtgggaattgaaacgccgcggcgcggagtttacggttgcagaccgccccatagcggaaacggcctcccgggtggcggccggattggtgaaccccctgacaggccgcgccttccggcccggatggcggcaggaagaatgcctggcggcggcagaagccttttacccggagacggaacgggaattgggcgggtcctggtggcagaaaactccgattttccgggaagtggagacggaggaccagtttgaaatctggcaggaacgccagacggctccggaatcctgcgcctatgccgggcctctttttccatggccggaacgctgggaaggacgcgggaaagccgcttatacgcgaggctccgccgtgctgcacgtggagaacatggttaccgccatgcggcggttttttatggaacagggccgttttgtagaagcggatgtatcccccgcagatatccggctggatgcaaacggtcttttccattggaacggccgcacgttttcccacatagtctggtgtacgggctgggaagccgggcttcatccggacatgtctccgctgaaggggcgcccctccaaaggaaccattctggatttggacttgaaagagctggactggcatgccggcatcctgcatttcggacactggctggttcataacggttctttctggcgcttcggggccacctacgcgtgggcgtgggatgctcccggcattccggaagcccccgccgtccaggaattgatgctggaccttgttaaacgctattccgggaacatggacgtcatccgcgcccgtgccgccgtccgccccatcatccgccgcagccagccggtcgccggccccattcccgggctggacggccagttcgtcttctccgggctgggcagcaagggggtgaccacttccccctggtccgccgcccagcttgccggacatctcgtgtgcggaacggatctgccgccggatctgctgcctgccgcgctctggaaatgatgcggaacatcagccgtccttccttgaacggaacagctattttccttgtcaaaaggttctgaacgcgattacatgcggcctaatatgcgagcggagaacgagaactggggagatacggtacggaatcatctgtttgaccagcgccgcgccgtcatggtgcactggctgattctgctcaatgtagtcatctttatcctggggttcttcttccaagtggacatcccaaggaatatttacccgcctgtccatttggacctgatccagctttacggagcttacagcgaatatacgtgctttcacgaaggggaattatggcggttgcttacctatcagtttcttcacgccaatctggggcacatcatgttcaacatgattgccctgtggtttttcggcccggttgtagaagaacgtttcggccatgggcgtttcctgctgtattacctgttttgcggcgtggctgcagccctgttttcctccctgctggggtacatgggattttttgatccggaatggcgcttcattcccatggtgggggcctcaggttccatttacggcatcatggccgcatgcgcggtgctctttccccatgcccgggtacagcttctgtttcctccggttaatttgagcgtgcgccaatttgccctggccgttctcggagtcgccgcagccgtcattatcttccaatggaacaatgcgggcggggaagccggccatctgggcggcatgttcgccggatttattctgacattgctgattttatggaaggaaaagctgtcttccccaagacggaaagacgtctcttcttcccactattcccctgagccttccagccgccgcccggcacaggcttacccctctgaaaaggaggtggatgaaatcatggaaaaaatatccaggtccggcctgtccagcctgacggaggaggaacgggaaattctccggcgcgcttcccggcgctgaactatttgttagatatttttatatttttcgttattttccttcctttttgccatccatttcctagcatggatgaatgatgacgcgactgtattcctccaccgtcctgggcgtagatggcgtagaagtggaggtggaagtggatttccgccccatggcggaaaaacgcacctttattgtcggtcttccggatgcggccgtgaaagaaagcgggcagcgcgtggacacggccatacaaaacagcggccttccctttcagcaaggtatcttcgtcgttaatctggctccggcggatttaaggaagcagggccccggattcgaccttcccatcgccctgggaatggttgcgggagcggctgaaaaggagatggacgcttctgcctggtgcatcgtgggagaactggccctggacggaaccgtacgccccgtgcaaggcattctgccgcaaatcatggaagcgcggcgcatgggcaggaaacgcatcatgctgccgcaagccaatgcctatgaagggacgcccgtacagggtgtggagatttatcccgtttcttccctgagagaagcctggcatttgcttacttccagcaccctgccgcttccatttacaggttcagggcgagaggtccacgctacacgggacaaagacgccgctgtggattttgacgaaatcaaggggcagccttatgcacgccgcgccatggagattgcggcggcaggcggccataatatcctgctttgcggctctccggggtccggcaaatccatgctggcgcaaagactcccgaccattcttccgcctctgagtccggaggaagcgctggagaccagtaaaatccactccgtatgcggtttgctgaaacgggggaacggcctggtggaccagcgtccgttccgggctccccaccacaccatttccgatgccgggctgatggggggaggcgcgaatatcacgccgggagaagtatccctggctcacaacggcgtcctctttctggatgaattgccggaattccgccgtgccgctctggaaaccctgcggcagccgctggagaccggccaggtagtcatttcccgcgcttccggcaccatgacatttccgtgccgtttcatgttggcagccgccatgaatccgtgtccctgcggttatctgggagacagaagaagagcctgcacctgccctccggcgcagatcgcacgctaccgccgtaagatttcaggcccgctgctggaccggtttgacctgctgatggaagttcccgccgtggatccctccattctggcttcctcacctgccggagaatgttccgccagtatccgggaacgcgtggcggccgcacggcggctccagtccagcagatacgcaggaacgcctttccgcaataatgcggccctttccggaaaagcgctccagaagtattgccgtctgctgccggaaggaagggctatcctgctccgcgccgtggaagaactggctctttccgccagagcctatgaccgcattttaaaggtggcccgaaccatagcggatttggaaggaacttctgatattcaggatgtccatttgtatgaagccgtgcagtaccgcgctttcgagcaatcactgagggattaacatcattaaccccttttcttgcgcggcgattcaaaacgcaaaaatatattcccgtgcggaaaataaaaaagaggcagcttttcagctgcctccctaataacgaaagttttactacgagcgtctgcggcgcagcagcatagctcccaggcccagcaggcccaaagacgctgcggcaggctcgggaaccgtttcataggaaacctgtatacctgtaattgtataagcggaagtagcggttccggcaccaccgcgcaccccggcgactaccttatatccttcctcccaggtaaggggagccgccgacatatccagggaaattgtcgttgtttccgatgtagaggtaaacgaaaagtcctgtatcttggaaagttcctcaatcagtgtgccggttgaatcatatacggcaagcaccatggaataactgctgattacagaagaaggagtattgcaggaaaatgtaatggaagaaacggaatcaccctgctgcggccctccaagaaccatggcaaaggaatccccgctaactccggagcgtccgcataatgtaatagttcctacattgttctcattcacccaagtgccttcattatttataccccaatttgaaatggagttgttattgccgccggcatatattccattttgcagatcctttactttgtccagaagctgttgccccgatgttctcgccatagtggcggtctgtgatacgctttgcgattcaggaagctcggcaataaccgtagccgcctgggcggacatcatacatacgcaactggctaacaaaacataatgataaactctcataacgctttgcattgattagaggattgttaatccgctctttttctttccgtaacatcatggggaaaacgctggacctattttcttcatgaatagtttacgataatgttcgattcataataatgaatgatttatgaaataacatgcagatgttagaatggaagaggcgcaaggattagtctttataaagtccttacatcaaaaaagaagcctactgccggaataccgctttttcaactttttatgttgacaacggattaacaatccgctgtcccctttatccaatccttaatgataaagaaaaagccgcctcagcaaagtgaggcggctttttccaagaagactttttaacgaatagcttccaaagcctgtttgaggtccgcaataatgtcttccgcagcttccgtccctacggaaaaccggatgaggtcaggccgtacgcccgcctccatgagctgctcatccgtcaactggcggtgcgtatggctggcgggatggagaacgcaggtacgggaatccgccacatgggtcacgatggtggccagcttcagactgtccatgaacttgatggaacgttcacggcctcccttgatgccgaaggttaccacaccacaagattgtccacctcggaattgcttctgcgccaattcataatactcattggaagaaagccccggataattaatccaggcaacatcttcctgcccttgcaggaattccgccactttttgcgcattttcacaatgccgcggcacacgcaggtggagggtttccaaacccaagttgagcaaaaaggcattctgcggagactggatggaacccagatctcgcatgagctggacggtcgccttggtaatataggctcccttgccgaagcttttgctgtaggagagcccgtgataggagggatccggttccgtcaaacccgggaatttatccttgtgcgcttcccagtcaaagttgccgctgtccacaatcacgccgcccacggcggcggcatggccgtccatgtacttggtggtggagtgggtgacgatatccgcaccccattcaaaaggacggcaattaatgggtgtggcaaaggtattgtccacaatgaggggaacgccgtgcgcatgggcaatgtccgccattttacggatatccagcacgcaaagcgtgggattggaaatagtctccgcaaagaaagctttcgtattggggcggaacgctttggcgatttcctccgccggagcgtcctggtccacgaaagtaacttcaatgcccattttccggaatgtgacggcaaagaggttgtatgtgcccccgtaaatcgccgaagcactgacgatatgatccccagcctcgcaaatattgaaaacggcaaagaaggaagccgcctggccggaagacgtcagaatggcggccacgccgccttccagttcggcaatttttctggcaaccgcctcattggtggggttctggaggcgcgtataaaagaatccggcttcttccagatcaaacaactttgccatttgttcgctggtttcgtacttgaacgtcgtgctctggtaaatgggcaatacgcggggttcaccctttttaggcgcccagcccgcctgtacgcacagggtctccggtctcaattcctgactcatcatgcggggcatgctatgccatgcctcctgccttgtaaagcagggaaaaccagacgtatggacaaattcgcccctgcccccgccgaagcacactcccggttttttcccagtataaaacccctgttcccggcaaatcagctgcaaagacaggggcgtttcacctgcgtgcgggagactcccacgatagaatgagacggcaattccgccaatcaccctttcccggaaccaaccgtgttccggcgaatgaagccggggacatcattacctgatttccggcaagggggtggaaatttcctcttccgtcagatagcagccgggatctgatccgtaccagtgcccatgggcaaacgcggcacgggtgcggaagcctccgccgcacagggcgaaatgagcgcagcggccgcaacggccttcaatttttttctgccgttccagagggtcgtcagagccgcgcagctcaggcagcatttccaccgcagctccggccctggcatcccataaatcggaaaaccggtcactcttcacgttacccagagtaacggattgccagaactggtccggatgcacggctccctgcgtgtcaatgttggcgatgccccggccggaactgttcgcgccgccgccattccactggagcaggccaagggtttccttcgccaggggggaaccttcccggagctggcgcagaagcaggtaaatgccgtccgcaggctgggtcacagtcagcacttcacggttttttccctccgctttccattcctccacacgggcaatcagcgtatccatggcattccgcgcttcttcctgagtcagggtctgcacttccacgccgcggccagtgggaaccagatggtaaaaacagacgcgctggatgtcgttggcgtcaataaagtccaaaatctggcccatgcactgcacattgttgcgggtcagcgtcaggcgcaggcccgtcttctgccccacttcgctgcaaagcctgaacccgcgcaccgcctgctcaaaagaaccttccacaccacggaatttgtcatgaacagcgccaatgccgtccagggaaatgcctacgtacgccacgcccagttccttgaaccgcgctgcagcttccggcgtgatgcgggtgccgttggtggaaatggtcactttcagccctttcccggtggcacgttccagcagttccataaaacgaggatgcaccagcggctcccctcctgaaaaaaggagggcgttcaccttgtagtccgccaaatcatcaatgactgcgcaacactgctcccaatccagctctcccttaaatttccgggcagaagcatccgcataacagtgtacgcatttgagattgcaggtgcgtgtaatgttccagaccacaatgggcttgcgcatacgggacgaagccggcgcacaggattccgcagcgccccctgcaaaacggccgtgcccgtggccctgcccgtatctcaaatggtccgcgggctgttccgcccctgtccaaagtctggtaatattaatcatggtgttgtgaaagcctgggctgataagggcagaggttgtcttccgccatcatgtctccgtaaacggcataagcacgggaccgggaccctccgcagatggtacggtactcacaccgtccgcatttgccctgcaacgcattgtcatcccgaagtttgaggaaaagggggtgcgtgcggtagatttctccagggtcatccgtccggacgtttcctgccgtcatgggaagaaaaccggagggctggatttccccggtatgggaaataaacataatgcctttgccgtcccgggtgggaatggcgcggcgggcgggcttgcttccctgagcgcgggcttcctgaagcgccacgcggcgataatggtgcccttccgtagttttaacgccgaaggatacctcatggcttatcctgctcagttttttccagatggcttccacttcttccgccgcaggcatttcatccatggcggcgcggcctgtgggcaccagaagaaatacgctccacatgcccggcttcattcttttcatcagctccacaaagtcgtcaaattcgcccagtgtgctcttggtgatggtggtgttgatttgcaaatgcatgccggcttccttcgccatttccgcagcccggagagtccgttcatatgtgtgggggacgccgcggaaggcgtcatgggtgctctcatgcgcgccgtccaggctcaatgacatgctctggactccagcttctttcaatgcacggaaatccgtgtgcagcagccgggcggtagcagccgggctcaatgctacatgcagccctttgccggaagccgcacggaccaattccagaatatccggcctcatgaccgggtcgccgcccgtcagcaccagcatgggaggccgcagttccgccaactggtcaatcaggcgcaatgcctcctcatgagtcaattcatccgggtgcggacgcggctgggcgacagcgcggcaatgcctgcacgcaagtgcgcaagcgcgcgtcacttcccagaagaccaggaaggggcgttcattgagatctgtttcactaaaaaccgggcgcatttttcaggacagccaatttagaacaattataattttttgaccagcccaaaaggacgcatcctttaaaaagttcacttagccgcctcttcacggattttctgaacttccttaggtaattcggaaagggaattcactgcttccttcaggttcttggaagcatccggagaaagcatgatggccgtcacatgcttgacaatgggttgcatcatttccacaagctgctgctgtactcccatcagcttggcctgctggttgcgggtgaggggcggcaggacggcctgtttcctggcaacgtccagcaaagccgcccggtaacggcctatctgttccacagcagccttgctggtttcctcatcccttaccttggccagggaatcatcaagctttttgacttcatccacagttttgaccagcagggtttcatgagtattgccctctgcatcctccgggaacggctccgcctgctcagccttgtcccgggaaacctgcgccagctccgtctgaacagaccgcaaatccgtcagggctttttgcaaatcgggcgtaaacagtccttccttttttaaacgggccagggattttaccaattcgtcggaaattttctgcacttccgtcatctgggcagaaacctgagcctgctcctggagtgtggcaccgggaagttccagctgcctttttccaagatccagcagttttttgtgcacttttttaactgtttccacagcagcggcagctccgggttcatccgtcaccttatccaaggctgccgtaatttcatgcatgctggcaacgctctgtctggtcagggaaagatgggagtcctgggcaaatgagggagctgttatgcaaacggcagcgcccaagccaatgaaagcagcggttttattcataatatggaagcctttccggcatggaagaatatgttttcctcccttccccgtcaatggcggctattgtcagagccacggtatgaaaaaaggactgtccgcaagcaagcggacagtccttttgaaatttttaacagcccggccttagtcacgctgctggcgtgaatacttgtagtagctctggaagccgagttccgcagggaattcgctcagaccgccattgggattgtattccttaaggccgctcatgccgcaacgtccctgataaggaggcttgtacgtgcatttgtaagtgggagcccagaaggtgacaagttcatagattccgtagcccatgcgctcaaacatggtcgcggtgccatcaacaatgcctacggaaaaaccggcataatccccctcgcggctcgtccagttgatgattcccagcgggatttcttcaacggaataaataaggttggcgatggcgcggcccagcttgcgggtgggggtgtattcggaagcggggggagcctgaatgtccgcactggcaacgccaaggacgccggcggcaaaaagagctgagatgatggcacgtttcatactgattgtttatatagtataatttgtcgaggaaaagcaactcaaaaaaacagaaaatcaatctgactccggccgggggtcccgcgtcatgagttccgcaagtgcttccataggaggtttggactcataaagaacggaataaacggcgtcaatcaggggcgtcctcacctccagcttccgcgcaatttcatagacggatagcgtgttgggcaccccttccgccaccatgcccagggtatccaggatttcctggaggctcttcccttccgccagtctccgccccaccgtctggttgcgggagtggcgggaatagcaggtaacaatcaaatcgcctactccggaaaggcccatgaaggtttccctgcggcctccgctggccacgccgatgcgcgtcatttccgccaggccgcgggtcagcaaagcggcctgggcgttatcccccaggttcagcccttcgcataagccggccccgatggcaaagacgttcttaatggttccgcccagctgcatgccgataatgtccgtagcggaataaacacggaaggttttggatgcaaatatctgctgcacccaatccgcatacttcggatcttcaaatccaatcagggaggcggacggaaggcccaggcagatatcttccgcatgattgggaccggaaagcacgcctatggggttggagggcagatattcctgaaggatttccgtcattcttttatgggttccctgttcaatgcccttggtgcaggagacaatgacggcatccggctgcaccggcaggctgcgcagccgctgggccacggaacgcatggccacggaaggtaccactactacaatgagttccgcatccttcacctggcccagatcgcaagtaggatggatattgggggccaggggaagggcggttttcgaaaggacggggctgcgtcttgtttcggcaagctgcctggcctgagcctcttccggcgtccacaggacgacttcacattcccgggtcgccagaaccatggagagggccgtgccccaggaaccggctccaatgactgctattttatgtaaccgattcatcatcttacttggactttttggaatagaaggagtgctccgttccgttgagaagccttgcgatattggaacggtgcttgagaatcaccagtgcgcctaccaccgtgaaaaaggcgacgtaaagtatctggggggagacatccccgtcctggcaaagcggataaatccaccatccggcggcgatcatcaccacagcggccaccaggctggccagggacacgatgccggagattcccataaccaccagccaagaagccagagctacgcaagccaccaccggattgagggcaaataaaacccccgcggttgtcgctacgccttttcctcccctgaatcccaggaaacaggtgtaagtatgaccgagtataacagcgaaacaggagagaactaccaagacattgaaatcccagccgcccgcatcccccgtcaggaacggcagccagttcaaggcgccgaacacagggatgaacccctttaagaagtccagaatgaaaacggaaaggccccacttccagcccagtacgcgccacgcattggtagcgcctatgttgcgggaaccctgctgcctcaggtcaatccctctgattctgccggcaaggtagccgaacggaatcgctccgatcaggtaatagaaaactatccaggcaatcatgttgtgcggagtgcattttaatcccccgccggtcaaatgacaatggggaaatcacctccggcccggttctttccggaggggttgctcccgtaaaagaacaccatacctgacagcctcctccagatcctcattttcaaggctctccgtgccccggtctgcggaaaagccctgtttaaggcgcaataagaacagcgcgaacattttcccgcccgcccagaaccatgctcccgcacttccttcgccggaataagcttatttaccgccctcgcagggtttccgcatgacggcagcccagacggaggcattatcctgctggggctccagcatatccttcacctgttccataatgatccccaccagctccctgctggaacaatccctggccttttgaagagccaggaaagaaggttctctcaacagctcgctccaaacctgcaagccatccgagcatgccagcaccgcatctcccggatgcaggagcaggggcatggcgctgatgtccaccagttccatgggacctcccataacggcggaacggagaatgcaacgctgccgaagcgcaccctgaagtgacattttccccttccggtaaaggcaatccgcaatcggtctcatggaatggtcttcattcagacggtccatgcgaaagctgtccgctccgctccataaatacaggggggagtctcccacgctgatccaccacaggaaatggtcgcggatgaagacggccagcaatgtggttccggattcctccggttccttctgaatggcggccaacgccctgttggcagcatgcaaagccgccgttaaacgttccgggatatcctcgatgccgctttccgcaaataccgcagcaaattcctgcgccaccacacaggaggcgcaatctccgcgaagatgccctcccatgccgtcgcacacgatgcccagcatcccgccggcggcgggaagacttttaaccacgtcttcctgctcgcggcgtttgccgatccattgggcggaagcgcagtccagaatatccggggtgcggggagccatgcggccggtggttcggattaactgtccttacgtttcaactgcgggaagagcagcacgtcacggatggaagaggcccccgtcagcatcatgacgacgcggtcgatgccgatgccgatgccgcctgcggagggcattccgtattccagcgtttcaatgaaatcatagtccacacgctgggtctccccggcagcctggtgctccaggcgttccttttgcacgtcaggatcgttcaattccgaatagccgggggaaatttcctgcccgttgatcaccagttcatatacatccactacgtccggattttcccggttcagcttggccaggggaaccaagtccttggccacgtgggtaacaaagcaggggttcatggtcttttcctccaccagtttttcatacacctgctgggaaacatccacatctttcatatccgggctgatttccactcccagctcttcacagcgggcgcggcgcgcttcgggggaaatgtcaaaccagtcttcccccgccacgccccggatcaggtcctggtagtcggcgcgtttccagggacggctgaggtcgattgtgtaaagaacattgccttcagcgtccttgtggtcaatctgaaggccgccgcagaatttttccgccagatggcagatgagctcctccaccatattcgccatggtttcaaaatcaccgcaggcgcaataggcttccagcatggtgaattccgggttgtggcggcggtcaattccttcattgcggaagctgcggttgagttcgaaaattttcgtgaagccgcccaccatcaggcgtttgaggaaaagctccggggcaatgcgcagcgtcagcggcatatccagcgcgttatggtacgtttcaaacggcttggcggcggccccaccggccacatcctgaagcatgggggtttccacttccagataaccgcgttcctggagaaagcggcggatttccgcaatcatgagggagcgcgtcacgaacagggaggcgctttcctcattggaaatgaggtccaggtggcgcttgcggtaggtcacctccttgtccgccagcccgtgccacttgtccggcagggggcggaggcttttggaaagaatggtcagtccggatacctttacggtaggttctccggtacgggtcaggaacgtggttcccctgatgccgacccagtccccgcggtccaggagcttccaaagcttccaggtggtttcatccacctcatttttatgcaggaacccctggatttttccccgtacgtccccaatgacgaaaaactgggatttgcccatgtcgcgaatagccagaaggcggccggcgacggctacctgtttgtcttcctggaaatcggctttcaatccggcgggagtggtggtcacgtcaaatcttgcgccgtaggggtcaattcccagctcacggattttggcgagcttgtcgcggcgcacggcaataagttcggattccgtcgtagtcggatgtgcctgctgttgttcggacatagtgcggggattctaaaggcttgcttccgttttggctagcgcattgtcaggcagaggggacatttttggcggccggttttgacccgaaggttcctcccccccctttttcggaagccggacgccggaacatgccccagtattccggccgttttgcaaaaagcctggacagaaccacataaagcacgatattcaaaggaattgaaacaaaactggtcttattattaaaaaatggccggcaaatccccacatacgcataattgcttttacctttggcaccagacatgttataaatgttcccgttaagacgcaccttatttatcaattatatactatccgtgcagacttatgagtgatcagacaaccgtaacttacagcacgattgacgctaacgaagccgtagcctccgtagcctatcgtttttctgaagtcattgccatttaccccattacaccatcttctccgatgggtgaatcagctgaaagctgggccgctgtcaacaggaagaacctgtggggcaccgttccctccgtagtggaaatgcagagtgaaggcggcgcggcaggcaccgttcacggcgccctccagaccggagcgcttgcaactacgttcaccgcatcccaggggctcctgctgatgatcccgaacatgttcaaaatcgcaggggaactgactcccgccgtgttccacgtagccgcccggtccctggcttaccaggccctttccatttttggcgaccacagcgacgtgatgagcgcccgctcctgcggatgggccatgctgtgcggctcctccactcaggaagctacggacttcgccgctatttcccacgccgctacactggaatcccgcattcctttcatcaatttctttgacgggttccgcacgtcccacgaaatcggcaagattgcagacatcacggacgataccctgaacggcatgattaagcaggaatggctggattccttccgggaacgagccctgactcctgatgctcccgttctgcgcggcactgcccagaacccggacgtttacttccagggacgtgaaacggtcaaccgtttctatgaagccactccggctattgtccagaacgccatggacaaattcgcggaacttaccggccgttcctaccatctggtggattacaccggcgctccggacgccgaacgcgtcattatcctgatgggatccggcgctgaagctgtggaagaaacggtagaagccatgatgacccgggaaaacgccaaggtaggcgtgctgaaggtgcgcctgttccgcccattccccgccgccgaactcgtcaaggccctccccgctacggtcaggaaaatcgccgtgctggaccgcaccaaggaacccggctcccaaggagaaccgctccaccaggacatcatccaggccctcttcgacgcccaggccaacggcacgctgcccttcaccaacggcatgcccaaggtggtaggcggacgctacggcctctcctccaaggaattcacccccgccatggtcaagggcgtctatgacaacctggctctggacactcccaagaatcatttcaccatcggcattaacgacgacgtactgggcaccagcctcccgtatgatgaagattattccacggaagcggacgacgtgacgcgggccatgttcttcggcctcggctccgacggcaccgtgggcgccaataaggatgccatcaagatcatcggccagcatacgaacctgtatgtgcagggctacttcgtgtatgactccaagaaatcggggtcctccaccatttcccacctgcgcttcggtccccgtccgatcaaatccacatacctgatcaccaaggcaaacttcctggccctgcaccagccttccctgctggatttgttcgacttcctgaagaatgccgccaacggcgccactttcctgatgaacagcccgcacccggcggacaagctctgggacacgctgcccgcccgcatgcagcagcagattctggacaagaacatcaagctctacacgattgacgcttttgccgtggcccgcaaaacgggcatgggcggccgcatcaatatgattatgcagacctgcttcttcaagctggccagcgtgattcccgcggatgaagccatcggctacatcaagaaggccattgccaaaacctacgccaagaagggccaggaagtggtggacaaaaacatcgccgccgtggacgccacgctggaaaacctgcaccaggtggacacaaccggaaaaactgtaaacggacacgccattccgcccgccatgtccccggacgctccggactacgtacaaaacgtccttggcaagatgatgtgcggtgaaggcgacagcatcccggtcagccaaatgcccgtggacggcacattcccgaacggaacgtcccagtacgaaaaacgcaatctggccctggatctgccggaatgggatccgaccctctgcatccagtgcggcaagtgtaccgccgtctgcccgcacgcggttatccgtagcaaattcttctctcctgatgctcttgcaaacgctccggaagggtttgaatgcctggatgccaagcatccggactggaagggagagaaattcgtcatccagatttccccgaacgactgtacgggctgtacgctctgcgcggacgtctgcccggccaagagcaagacggacccgacgcacaaggccctgaccatggtcccggccgggaagattcacgacaaggaagaagccaattggaatttcttcctgagccttccggacgtggaccgcaccaaggtaagaacggacaacatccgctccatgcaggtgctgcgcccgctgttcgaattctccggcgcctgtgccggctgcggtgaaaccccgtatgtaaaaatgctctcccagctcttcggcaaccgcctggtggtcgccaatgctacgggctgctcctccatttacggcggcaacctgcccaccaccccgtggtcccatgactctgaagggcgcggccccgcctgggccaactccctgtttgaagacaacgccgaattcggtcttggcttccgcgtctccctggacaagcagatggaacacgccattgagcttcttcatgaagctgccggtgccgtgggccaggaactggtggatcggatactggctaatccgcagaaggatgaagcagacatcgcccagcagcgtgaaaacattgaagaactcaagaagaaaatcgccggcaagccggaatacgcgcgcctcctggcccttgcggataaacttgtccgcaagagcgtgtggattctgggcggcgacggctgggcctacgacatcggctacggcggcctggaccacattctggccagcggccggaacgtgaaggtgctggtcatggatacggaagtatactccaacaccggcggccagtgctccaaatccaccccgcgcgccgcagtagccaaattcgccacgaccggcaagcccggagtgaaaaaggatctgggcctcatggccatgacttacggcaacgtgtacgtggcctccgtcgctctcggcgccaaggacgaacacacgctgaaagcctttgtggaagcggaagcctatgacggcccggctctcatcatcgcctactcccactgcatctcccacggcatcaatatggccaagggcctgcagcagcagaaggcatgggtggattccggccgagtcctgctttaccgctataatccggacctggcccgccagggcaagaatccgctgattgtggaaggcaaaggcccgaaaggcgatctgcgcgatgtgctgctcagcgaaaaccgcttcaagcttctggcgaagaccaataaggaaggattcgaaaaactccttgaagaagcccagaaggatgtctggcaccgctggaacctgtaccaaagcattgccggcatgggttccgacaaacctgcggaataaggtacaggccgcttaatttcaacgcccctgtccggcttatccggcaggggcgttttttactgccggatttcatgaaaaacaaaccatgaatatttcggggaggggactgcctttccgccccgccatacagccacgcaagcaggcttcctgcgccagtactttccctttctgaaaaccggagaattcatccttcccccgcagcacaaaaaaggggcacaccttgctgcaaggccgggttttaatatatctcaccttatacgggttaatttccgcatggaggttttgaaggccttcaaggaaccgcagcctttgctgccagccatgtccaaggtaaagacgggcatctcatgcggccaagggaatactgttttctcacaccttcctccccataggagcgcggcccgctttcctgcggaccgcgccggtggaaaaaccggaaaaaggctttaaaacagggatgctgcttcaagattcccgaaaatggtgcacaccggaggagaaatataccattccggatgccgtatccgggaagtgcaccacatcaggcgtcaggcgagtacccacatccagatagaccagcttttccgtagcggatccgttgcggataacatgcgctccctccgggctggcggggaatacaatcgcatccccctcttttaaattcttttcaccctcaggcgtacgcacaacggcatggcccctaatgatgtaaaatacctcttcattcacttcatgataatggtagccataggcgtacctccccggctccacttccacgaaactggccgcacattttccggcatccgcttcccgaatgacgggctttaccgcaaaggaattgccctcccggctgataacctgaggctccgtctccctgtaattggcaatgatgatcttgttcatggcattatctgttctgcttgccgtaacggcaagtacctattaaaataggcggcaacattctttctgtaaagtaggcagaaaatagtaacctgaattcctgaaagaaaccattgcgtaaactaaatgacttactacaattcatcatgccctgttgaaactactctccaactgatttcctcccgctggaaagtgctcatcctccgcgatctgctcgaaggcacccggcggtttggagaactccgcaaatccattgggcctgtgacgcagaaagttctgaccgcgaacctgcgttctatggaaaaggacggcctgcttacgcgaaaggtgtatgcggaagtacctccgcgcgtggaatatactcttacggaactggggcgcagtctgcgtcccatcctggcctccatggcggaatggggatcgaaataccaaagagaaaaccgctgatcctcccctccctttccggagcttaaccgaacctccggaaagacatggaaatacagcggtttccctttttcccgcaagaaaggtcaacgggaaatttccgtcgttttacggataatttcacgggctttccgcacgtcttcctcatgggaattcccgcggcttttttccacggtaaagagcttggaaagctcttcatccatgcgggctacggcagctttcgccttaggattttttgcggcgcgggcgcgcaggatattgaccttttcaaattcctccagtccgtcccggagtttttcaaaccgcagggaactgagattgccgggataaacaaggtagcagtctcccgcgggccagttcccgaaatccgtcttttcaaacggattgcggttccaggaattataagcccatctcaaaaagccgtccaaatgattggcggcggcaaagaggggaagccattccgcctccgccagcggggaaatagtgaaggtgttgggctttttgggatggacacagacgtagaacgtcgtcttttttccctcctttttgcgctgcgccagcagatcgcccgtaaccgtgcctgcatggtcaattacaggagagacgtcataaacgtcccgggtcatggccgtaggccgattgacggcggaaacgattttgaattccggggcatacttgtccagcacattcttggccgccctgaccatagcgtccggccgttcatccagcccgatgcaggttttgcccagccagcccttgctcttgacgtgtttgcgaaaatccgtcaggaaaggcccccagatagcttcataggagggatcgttcggcttaagatccagaaatttgtactttccggtcgcctcatccagataacggattttcatgttccagggaatcatggtatagcaggatatctgccccttgacgcccacctcgttcatcatgaaggaaacccacttgtcaaaattggcgtaattccagcgcatggttccgtttttgcccttgacccattcaatcatgggcgggaaccagtcataagtctgggcattccaggcttcatcaatcagggagcatgtaatggccttttgcccggcatccgccagccttttcatcaccggcttcatcagcgcgaaatgctccggagaccacggttccacatcatgccagcgggccacggcctgcggatgctgccacaagtccagatgaacttgccaatgcgcgggagcagggagggattccggcgccacctccagaattaccggcacactgacgggagagccgctttctgcggaaaccaccacttttcctttgtacacgccgggtttggcagacgggggaatattgacctccacccataccggacgcacgcctccggcttgcaaatcgcagctgttttcgctgccgatgatatctgaaatcagcctgttgccccccctggtgtagcgtatcatggcagtccggacaggaataatctgtccggcagcgttttttaccccggcgcaggaggccgataactggggctgcgcctgggaagaccagacggcaatctgcccgccggcgcgttcgcctctccagccgaacagacgcacggcatcctgaagcatttcctgcccgggagcgccgttgtaaggaatacggtcataatccttcaccgctgcagcctgcaggctcagggcggcatcgggtccgtaccctttgatttccaccagatgtccccccttttcattgccggcgctattgcctaaaaaagtgattttaacgtaacggaccgtctgcggattgaatttgaagggaacgccttccggagtggcggcaatgctgttggaagactgatccgccaacattttccagttttttccgtcttcggaaccttctattttatatttgtaaatgcgccctccctcccaatagggccatacatgcagggcggaaagcgtccggggctttcccatatctatctggagccagacgggaatgccctcgcaaccccagtatttgccggcgttattcgtctgcccgtccacggccagttccggacggtcactgccgtaatgaccggaagcggttactttggccccggcaaataaattacctgcatcacccggagttcctgcggaaacaagggcgggttcatacaggggatgcctctccagggactgggcctggacaaaagacgttaaggcaatagcggaacacagaggaaaaaaaagacagcgcatacgcatattacgcaccggaatttcattttctctcaaaagaaaagctgtttccgctattccgccaaaggacgcacgggtattcctctggaagcaaagtaagccttggcttccggcaccgtgtattccccgaaatggaaaatggaagccgccagcacggcatccgccttcccttccaccagcacgtccaccatgtgatccaaattacccgcacccccgctggcgattaccggaatgcgcaccgcactgcttacggcgcgggtcaattcaatatcataacccgttttggctccgtccgcatccatgctagtcaacaagatttccccggctccgcggcgttccgcctccacagcccattccacggcatccagccccacgaatttccggcctccatgggtggaaacgccccacttgccggaagcctggcgcttggcgtcaatagcgacgacgatgcactggctgccaaaagccgccgcaccttcattaatcagctccggcctattgatggccgccgtattcagggaaaccttgtccgcacccgccagaagcatttcgcgcatgtcctttacggaacggatgccgccgcctaccgtcagcggcatgaagcaacatgccgccgtgcggcgcaccacgtccgccatggtggcacggccatcggaagaagcggtaatatccagaaaaacaagttcatccgcctgctgggcatcatacgccctggcacattctacaggatccccggcatctctcagattaatgaaattggtccccttgacgaccctgccgtccgttacgtccagacacggaatgattcttttagccagcacagccctatcaagccatcaccgccgccaaaggaaaagcctaaaatacggcttgccgcgggatgccttttaataaacatgttccctttttgaccaaggccctcttcggcagcgtttccatcccgcatatccatggtaagagaaatttactgaaattcatcaatatcactattccactcactttccggccggccctgccccgccatgaagcaacgcagtgcggcatctgcccctttcccgcccgcatgcataaaacggcctaagagcttttctttccatgtccaggtggtagagtccgcataaggcatttccattcatgaccaccacacgctcgggattcaccaaacttgcagccgtctgcattgccattcttctgggggcggtggtctgggagctggggtggcccctgacgcgggcggaacatgagtggtcgcggctgattgcagccgttgccacgctgggccacctgacgggcattctgggttcctatttccggaaggaaatcaaccgcccttccctgaggctcctgattttccaaatcatcagctgcctcatgatttttctcctgattgccagggaacaacaggaagcgggatacatgaggttcacggagctttcccgcctggtgattacggccgggctgattgccatccccacgctgatgtccctgaccaggatttttgaatggctggtgggcaagcaaaaaaaaggccggcctcttatggcccccgccatgcagtttgtagcttctctgggagtagtcatcctggcaggcaccggattgcttctgctgcctaattccacatatccgggtattacactcagttttacggatgccctgttcaccagcaccagcgcagtatgcgtcaccggtctgaacgccgtggattttgcccatacttttaccccgctgggagaaatgttcacgcttgcccttatccagattggcggattcggcatcatgacgttcgcctacttcgtagccatggtggcaggccagggtttttccctgagggaccgcgtgctgctgacggatctgcttgatgaagacaatctgggagccgtcgtctcctttatcaccactattgtggtcagtacgctgttcatcgaactgtgcggcgccgtccttctttatttctcctgggaagggaaggacatcaacctgatgggggagcctttgtggtggcattccctgttccactccgtttccgccttctgcaatgctggtttttcaactttcccgatgaatttgatggagccgggcatccgcctgtgctacagcgggcaggcggtcatcatggcgctgatcgtatgcggcggcctgggattcggcatctacaaggaaatcaattcacgcctggcaaaccgcttcttttccaaacaccgccgcctgcacatgcagtggaccccttatttcaaactggtgatgatctccacggggattttgctggcgggaggcgctctggccatctttgccgtttcctctccccatgccgcggaaccgttgggggaacacctctggatttgccttttcgacagcgtcacggcacgcacggcgggattcaatatcagcgactacagccgctatctgcccgcagccagcctcattatgtgcggtctgatgatggtgggaggcagccccggcggcacggcaggcggcatgagaaccactacctgcgccattgcaggcgcggaaatcctgcgcatcctccgcggcagggatcatgtggaatttttccgccgccgcatcgaccagcgcaccgtggcgcgctgcgtgattaccgtggtggtctcctgcgcctggatcggctgctttaccgtcctgatttgcgccctggagccctccatgagctctctggatatcttctttgaaaactgcagcgcttttgctacggtaggcgtgtcgcggggcattactccagatttaagcgacccttccaaataccttcttatcgtcaacatgctcgccggccgcgtggggcttttcgcttttctcattgcgctggccggcacccctactccgagacattaccgctatccatccgtcaaaatcccgttaacctgaatataccatgatgagatacaccgttatcggcctgggccagtttggacaggaactctgcacagaactttccgcccgtaatattgaagtagtagccgttgcctccacagatgaagaattggagcaaatcaaggatctggtgacttatgccgtggtgacggattacactaatccggccgctttgcgtgagttggaactggacgaccagtccgccgtcattgtcgccatcggagacagttttgaagaaaaccttctcgtcgtcacgcaccttcagaaaatgggcgtccgctacatctacgcccgcgtcatgagtccggtgcacgaacacattttaagccagatgaacgtatatgcgctcatcaacttatcccgcgtagcttccaagcagctcgccagccagttggaatccccggaattcctgcgcgtctcccccatggacgaaaaccacagcatcgtggaaattgccgtgccgcgcatctgggtgggcaagcgcctgcgggatgtgggcctgcgcacggaacaccacctcaacctgctcaccatccgccgcggggaggcccagactccgcaggggcgccgggaaatcctgtccataccgcgcattcccgtcattggcactccttccccggatctcgtttttgaagaccatgacattctggtcctgttcggcaaggaaaccaatttgattgaattcgcccaattatccaagggattgtaaaccatcctccgcaagcaggctgagggtatccctctccatttcagaaaaaggcgacggataagccgcctgtgtaaacagcctccgtcctggttttactggcttgacaatgcctcaaaagaagccaccagacgtttttcggagacgcggcccttgacggagatggcgggagcgaaaatggccaggcggtattcttccagcaaataaccgtattgtatccagcgcaggtctccggcatgttccttcaaaacctgatgccagggaaaatacacgcgttcaaagaggtccaggcgttccaattccctggcaaggggttgctggctgatgcgtctgatacgctccgcaattccctgcatgtaccgtttcagatccggcaagcgttccgctccatgcgcccacaggaaacgggggcgtaacaaccagtcaagctggcgctgaaggtcagccgtgatgcgctccgtatggcgcacgcccttttgcagcgccgtaaagtccctgacggcatgttccgtacccgctaccagttcccatatatccgctacgttatgcgccgcatcaaaaagattttggcgcagattcatttccgcagcagcgaattgctccgccgtgcacggcaaaggacggcccatggctatctccgcggcaacgtccaccaggtcttccgcattggtagacggctcccgtccgagcatatgaagagagagctttccttccagcttcaacggaaattttctgcggagatggttaagctggtccgtctggcgcaggcgcatgaaacgcaggcacccttcccggtgggattccgcagcgctcagttcatcctcaaagacccggacgcccacggatgctccttcatccaccagagccacataacccggccttcccaccacatccaccgtgtactccaaatctccgcagctccattccttcatgccggttacggacacgatatcctccgctgtttcctggaaccggcgggaaagttttttacccaggcggttattcagttccgcaacatccgtgcccatggcaagctcttccccttcatcatcgcacacccatattttcgtaaccagctccgcaggaagacggttcatatcaaaaaaggagggcgcgcaaaattttcccgtttccacttccacaaattccgccagtttccctgccagcggcccatccggttccaggccatgcctcagttccgcaaagtaagcggccttttggctgataggctggagaaagacgcgcaaatccttgggaagggaacgcagcaggcattccgcccgctgggccagatggccgggaaccccccactccggcaaccattcgggaatatccggcaactggtcgatgtggacgcccagggtcacgccgtcatcttccgcgccgggatcattctggtaatacacggcatattccgctcctttacaggtgatttcatccggaaaaccatccagcaggtctttcccccagaattcgtacatggcttcctgtggcggaacatgcagagcttccggatttttcttctccacaccggcggcccaccgcaaaaaggccctggccgtacagcagtccgggggaacaagcctgttaaagaattcaaaaactccttcctcacaccagacctggtccggacggcgcaacttcagctctatctgccgaacatcttcccggagcgtttccagatgcctgatacaggcgggtttcgtgcggaaaccaccgcccaacaggccttcacgtatcattatttcccgcgcatgggcgggattgatacggccatagtgcacacgcctgttatcaatgatgcgcaagccgccgcacacgacgcgttccactgcgtaaacagccccctgctccctgtcccaccgcgctccggaatagtgtgattcgcacagatggggcgctactctctccacccattccggttccaaaatggaggcgcggcgcatccacaggcgcgtggtgtccaccaactccacgcccattacccattcactcctttttttacggcggaacaggccggaaccgggaaaaatgccgaaggaacgtcctccggcgccgcgatattcccggttgtctgcatcccagaggccgaactggcgcggaacgcccgccaggatgctccggtgaatcatggcaaaggaagcctgccgctccgttttttcttccaaaggggaaattttgcatttcagtgtttccctgaccaaccgggaaagatcctcccataaattgaaccattccatcatgcggttgaaattgaggaaatttttcccgcaccatttccgaagctggtttttgcgccagcgccttccctcccggaattgccatgcagccttccataatttaagcagagacaggaagtcactgtcttcttccttccactgcgcgtgggcctggtccgctttctgagcggcatccgcagggcgttcacggggatccatgatgcccaggccggctacaatcaccagcatttccggcagggcctgttcatgttgagcctccagcaacatgcgggccagccgcgggtcaatgggcaaccgcgccagctttctgcctacgggcgtgagttgccgggctttgtccagagcgccgatctcccgtaaggtgcggtaaccttccgtcaccagtttggatgaaggaggatccggaagtgggaactccggcatttctggcaatcctaggtctttcatccggagcagcgctccggccagtgcgctgcgcctgatttccggatccgtaaattccggcctgtcctcccagtccttctcactgtacaggcggatgcacacaccttcgcacacacggccgcaacggccagcgcgctggcgggcactggccttggagacgggttctatctgaagccgctgcacttgacgtgccgggctatagcggctgacgcgcgccaggccggagtcaataacataaatgatgccggggattgtcagggacgtttccgccacatttgtagccagcacgatgcggcggtatccctgctccggatgaaaaatcctttgctggtccgccaggcccagcctggcgaacaaaggcagaatgcacgtatttctcagattccggcctttcagtttttccgccacctcacgtatttcgcgttctccgggaaggaagacaagcacatccccgcgatcgtccagagtatccagccaatccacggcacgcgccacatgagccggaagttcctcatcgtcatgcagcggcggcagatagtggagatccaccggataagtgcggccttctacttgaataataggcgcgcctccaaagaattcggaaaacccaccggcatccagcgtcgcggaactgatgaccagccgcaagtctctccgcctgcccagcaaaagacgcagatagccaagcagaaaatcaatgttgaggctgcgttcatgcgcctcatccaaaatcagggtatgatattggcgcagatccggatcatgctgcgtttccgccagaagaatcccatccgtcatgaacttcaggcgcgtatccggcccggctttttcctcaaagcgcacctggtaacccaccaaacctcccaggtcgcagttcaattcttccgcaactcggcgggaaacggaagcagcagccagccttctgggctgggtgcaccctactctgccccgcgcctccccggcaagctccatggccattttagggagctgggtagtcttaccggatcccgtctcccccactacgacaatgacctggtgctcctgcattgccgccagaatgtcattccggcggcgggaaatgggtagatccggataagtaatgttcatggtgaagatgagaaaaaaaccctgcaagaacgtcctgcagggttgaagaagaaaaccgggaggttcttttactgacagggtttgggaagggcgatacggccgctccgggtcagcatctgcacatcataatcctcaatgagggacaggaaacggtctatcttgtactcgcctcccgtcacttcaatggtcagggcgtcccgcgtgacatccacaatgtgggcgcccagtatctggcagaactcaatgacttcatgccgcgtggcggaatctacgccaatgcgggtcaataccgtttcccggtacacattgtccgtattgcggaaatctactacttccaccgtgttgaccagtttttccagatgcttgataatctggtccagaacatcctccttttcgcgtacgacgatggtcatccgtgaaaagcgcgggtcctggctaggggcaacgttcaacgaatgaatattgtagccccgtccactaaacaaaccggcaatgcgggcaagcacgccgaatttgttttcaacaagtacggagatagtatgacgagtcataatttaatttcttaaaggtgatgcattgtaagcacttttgactgccagtcaagcctgcggacggcgatgccggaaaacgtttttcctaacggaggttccggcaggaaccgctcaggccggatcaaagctcgtgcggtatgatggcgttgccttttgtcgcctccgggatgcggggaagcaatgttttttcagaaacggggcacgcatccactttcacattgaattgctgcccgtcgcgggaaacggtcagcaatgccggcccttccctaagagctttgaccaaggcttccttggtgctgacactctggtggtttacggcaaataccatgtcgccggcctgcaatatctgccccacggatttcttcggattcacttgaatgaccagcaacccccgagcacctatggattgttcttccgcagtcagttcacgcaaatgcattcccactccttccatgaagtcttcccaaggagaaggaacattttttaaaatactatcttccaccttcagggtgacgttcattttttgccctttgcgccagactttcagccggaacttgtcgccgatggaaagattttcaatgcgttccttcacttcctcatccgtctggatggggacttcgttgaaactcagtattacgtcacctgtttgaaggcctgcctgctccgccggggaaccatgcttcacgatgttgattactgcgcctcccgcctcatgataatccaggaagctgcgaagcgggggagtattgcgcacaatgtccaatcccagataccctttcatggggcggccatgtttgcaaatctgctcaaagctgtgcatcaccagattggagggaatggcaaacccaatgccggcgtaatttttctccgcattggaaagcaccgatttattgatgccgatgatttccccgcggatgttgatgagggggcctcccgaattccccgggaagatactggcatccgtctggatcaagttaatgccggaatccaccagcttgcgttcacgggcactgataatgccgcgggaaacagtcgtgcccagcccatagggattgccgcatgccagaacaatcatgccgggcgcaatttcatcactgttgccgaacggaagaggggtaaacgtcatcgggttttctacctgcagcacggcaatatccagttccggatccacccctaccaggcgtacggaaacgcttttcccattgctcagcgtaacgcacagcgcatgcttgttctgaatgacatggtaggcggtaataatatgcccttcttcagtaacaatgacgccggaacccaaaccatgaaccgtcagcctcttttcaatcatgaaatcaccatcctcggaaggctgaggaacgcttgtcacgcctgtagtgtctatgctgaccaatacccgttccaccagccgagcaacgcgtgaatattcctcattgagctggtgcaaaacaggaatatcctcctccttcaattcgggctgttgggccagggtaaacacttccgaccggaaggaaacattcttctccgtaacacgactgttccatctccaataggcaacggagaccacggtcatcataaccgtcatcatgatgacaagtaaagcccgtgtccatatggtcgatctcatggaaatgccctgccgtaataacgatcaaacggtttgcggcttgatcacaaggagatgcctgaaaacggagcctgtcaagcttcagccgcttttcgacattccggttccattgatactatttaagtactttctcttcaaatgaaaaaactttcaaatgacaaatacgcctttcaacaaggcgtactttatgatatcatgcggccacggttttatgggttccagcactttacaacaacaggccattcatctcgtcttcggtacggatgaaggaatggtgcgtgaaaaggcttccggcatctttgccgctctgacggaaggcacaaacgaattttcccatgaaattctggaagcggcctgcggtgattccgatgaagcggcccagctggtacgccaggttatggaagctctgcggaccctcccgttttttccggggcgcaaagtagtctggatgaagaactgcaattttctgggagactccgtcacggggcgttcctccaccacggaagcggctctggattctttcaggcaattgctggaaagcggcctggggccggacgtcctgctgcttatttccgcctccgaatttgacaaacgccgttcctttaacaaattcctgcttcaatacgccgcatcggaagaattgaacaagccggacatcacgaaagcaggctgggaaggcagtttaatgcccctcattaataaggaaacggcggcgcgcggcatgaatttcgactctgccgccctggaactgtttattcaccgcgtcagcgaatcctcccgccaaatcatttccgaaattgaaaaactggatctttatctgggagcggacagacgcaccgtaatgccggaggatgtggagcgcatggttccgctgacgcgtacaggcgttatttttgaaatttcccgggctttggaaaacaagaaaagcgatgcggccatctctctgattgattttcaactggaacgcggtgaaaacgccatcaccatcatgcgtgccgcattcatccctacgttaagaaatttgctggctgccagacttttatgtgacgcattcaacctgaagcccaccaatttcaaggaatttacggcccgcatttcttccctgccctcctatgcggccgcgttaattcccttgaaaaaagacggtacacccaatgcgtatccgctttttctggcggcgcagaatgcttccaaattcaagacggaacggctgaagcaaactttgaaagaatgcatgaaggcggataaagccctggtgtcctcctctcttgatccccgcctgattctgcatcgtcttgccatctgctccgcatcctgatgaactcctccccttcttccgttttccccctgtttgacgttctcgtcgtcggcgccgggcacgcaggcattgaggcggcactggcagcatcccgtctggggtgctccgtcgccgtcctaactcataacctggatactatcggacaaatgtcctgcaatccggctatcgggggacttgccaaagggcatatcgtccgggaaatagatgccatggggggagcgatggggttgaacacggatgctaccgccattcaattccggatgctgaacgcttccaaggggcccagcgtgcgcgctccccgcgcccagtgcgataaaacagcctaccgcacaagaatgaaaatggttctggaaaccgcccccggcatacgcctgtttcagggagatgtggtcaaactgctcgtcaatggagaacagcaggcaacgggagccgttacttctctgggatgcgccatccatgcccgcagcgtgattatctgctccgggacattcatgaagggattgcttcatgtgggccttcaacacataacaggaggccgaatgggttgcgcttcttccagcctttccgccgatcttgccatgctgggttttcaggtggaaaggcttaaaacaggaacttctccccgcgtcaatgggagatccatcgacttttccgtctgcgaaatacagcctggagactctccggaagccctgttcagctaccgttcccgtgatatactgaaacgtgattccgaacccttttgcactttgaacacgtggggagatgaaaatttccggatgaagcaaatgccgtgctggatcacctacaccaaccagactacgcacgacattatccggaagaatttaaaattcagccccctttatagcggtatcattgaaggcgtaggcccccggtattgtccttccatagaagataaaatcgtgcgttttgcggaaaaaaacagccatcaggtattcctggaaccggaaggccgcagtacggaggaattctaccttaacggagtttctacttcactgccctactccgctcagtgcgacttcatccataccattcccggcctggaaaacgcgcagctgatccgtccgggatatgcggtggaatacgacttctgtcctcccacgcaattgcatcctacgctggaaacaaaactggtagaaaacctgtactttgcaggtcaaatcaacggcacttccggctatgaagaagccgcagcgcaaggactaatggcgggagcgaacgccgctctgaaaaccctgggcaaaccttctctggtgctgcgccgggatcaggcttacatcggcgtcatgatagacgacctcgttaccaaaggaaccgatgaaccttaccgcatgtttaccagccgggcagaattccgcctgttgctgcgtcaggataatgcagacctgcggttggcccctctggcttttgaagcgggccttattacctgtgaaatggcccggaaggctgaagacaggaaaaacgccgttgaagaaggaataataaaagctgccgcgcttaaacatgaaggagtttctctctccacatggcttaaaaggcccggcaatgactggactctattgcctgaagaactgaaaaaaatgttccacgtggaacatttggatgccattgctacggatatccagtacgaagggcatattgaaaggcagaaaaaacaggcggaaaaaatcatacggatggaaaataaaactattccctccgatattgattacgaacatgtccatgccttaaaaaaagaggctgtcatcaagctgggcaacatacgtcctgcaactatcgggcaggcctctcgaattcccggaattaccccggcagatatcgccctgttgcttgtgcatctgcaaaaacgcagcaggcaacaaacataataccccgcgttttttattcagaaatttcaatttaaggaggaccataggaggcgggtattgaaaaataaatatggcagggacatccttgagccgtatatgatcccattatatttccctgtcgccattgcctggagtcgataaaaagattcaatactgttttctgaatgtctttttgcgcgacagcagctcttcccttcctccgaacaaccaccactttctgcttgtcgtaaaaagaaatggaatatcccttcagtattattgaataccggccttcctgatttatccatcgcaaatcattaagaagcgtcacacgatttcttcacggattccattcaaatactgccgataagaaaaagcagcattgagcttactccaagaggcaagggaggccggaagggctgaatgacaaatccaccgggcgaatgaaaattaccttcccaagtttaaaattcttcggataaccaataaacaaagacctcatccattaccggtaacagatatctccccggatacatacatcatctccaaaaatatttacaacaggttgttcaagatgggcttcatgctccagaaacggaccgggcgctacgccgtccgtaccgccgccgataatgatgggagcataaaaccccacccactcgtcgactaaaccggctttcagaaattcccggaccagacagcctcccgcttccagcagtatagttcctatttttttattattatataatttttttaataattccaaataattgaaaacattctccacaaccaaagtgcggtcacgaaattcatctgttaaacaaatggaatccgcaggtatggaagaagcatcatgggttagaataatacgccagggttgttccttgaggggagaaacaggacgatccggtttcctaatggtcagggacggattgtccagacgcacggtattccctccggtaagaaccgcatcgcattcggcacgcaaggtatgtacaaaagatctggatttttcattcgtcagccattgggaacgttccggactacgggaaatgcggccatccagagacatggcgctttttgcaattacccagggacgcccttccagcatgttcaccctgaaccccctgattaaatgatcgcattccttctccagaaccccgcgggtaaccttgatgccggcctgttcaagaatatcagccgcagcgccgcggtgtttgggattaggatcttccgaaccataaaccacccgtttaaaacgatgtttcaaaatggcatccgtacaaggcggtgttttcccggaagtactgcatggttccagagtaacatacaaagttgagtccgcgaacaggggggcattgccattcgccactccgtcggcaatagcctctctttccgcatgaggcaagccggcttttttatgaaatcccgaaccaatcacctggttttcatgcacaatgactgcccccacgcagggattcggactcgtaagtccgattccatttgaggccagttttatggccatgttcatccaacagtcatcctgatttttcgtattcacgccgttttgtagcatgaaaaccggaagaaggacaatcacgttgtgtgattgaagaatattaggtttaacaatattaaattccttcttcttctgctgtgtgcccagtgtgaataagattttaaatgactgtaaatgagagtattgagtatcatttcaaatgttaataaatttggcctgcaaatttgtgaataatatctgaataagttattcacatcatactcacagttaatcaacctggcctttcacaaggttattggcaggtgcggctgtaaacagaaacggcattcctgcttgcagaaaacccggaggaaagcataccatccttttgtgaaggctgccagattgatttacattccggagagggatcatacttttcccgctacaagccctgaaaggcccttctacggcttttccgtggctggaatgaatatagccgcttactgtgcttcccgccttcgggaagtgggctttgaagcggtttttgacccgggaacgccggtttcagaagaaaaaggggaaatcatcgaagtgtccatgcatgatttttccccggaggcggccatatggcttgccttttgcggggcaggggaagcaaggagtgaagaagggcatttgctggcccggaaaagcggggaaaacgggttgacgcgggtattcacgcggaaggaagcagcgatagagcgcctcgtttatccctgggatcttctggaatggcaggaaagagtgatggagaagatggagtgggaggatttctccggaagggaaggggtttatgtcatgggaacgctccgggtaggggaaggaaccgtcatcatgcccggcgtggttgtagagggagccgtatgggcgggtgatggctgccgcatagggcctaattgccatttaagggggtgtgtatctttggggaatggctgtgtagtagggcagggagtggagctgaaaaattgtgtcatcggcgacggcacatttattcctcatttgagttatgcgggggattccattattggcagtgacgttaatttcggcgccggaacggtatgttccaattttcgccatgatggcggcgaacacagaatggtggcgggaggaaagctggaatttactggaagaaacaagcttggcgctgtcattggagaccatgttcggctgggtgccaataccgtcgttttgccggggcgggttcttcctcccggtgcttggaccaggccgggggaagtcttcacgggggcatgaatcggggaaaggaattttcttaatactgaaaaggccgcatgcggaaaaacgtcttcccgcatgcggcctttggctaatggttaaagttgcttcagcagcaccggcggcggcgcatcatcagggcggccagccccaacaggcccagggaagctgtagctgcttccggcacgggaagcacgacaccgtcataaaatttgacgttgttgatatccatagtgccgttcatggggcgggtatttccaaaagaagctccaaactgggagcctgtcagggcaggggaggatggattccactcggtaatcgtacctgccagagcgccgttgacatacacggaagcgtttgggaggaaagatcggaaacgatgctcagattagtccagctgtcctgctggagatccgtccaggtcaatcccgtattgatattcccgccagtttggccgccgaaccccttattgtagaggtagagttctccgttattagtgaattccagcaccatgctgttggattctccggagaccgttccattggtgtacaggctgaaaatgtctttccacccattgctggtggaactcaggtttttcaggtcaaagctcacggtgaaactgccttggatacccgttatgtttgagttatagggagtgccggaactgctgccgaacgtggcgtaatcattgccggaagtgtaattgaaggaaccgttccagttgggggcggttatttgtgctccttccgcagtccattcccaggaatagataggggtagccgcatggaccatgcctgccgctgccagtaaagataaaataataaatgagcgtttcacggaaattctgaaatatgggttaaaatcaatccgataggagggtagcggattataaatccggggtcaaattatttttctgaaaacaaatcatttaacggaaaaaaattacggagaagataaaagaagagaaaacagaaacggcattcctgttggaaagaaaacgtacatttccaataagattgccgcatcctgggaaaaaagagacaatatccggatttataatccgcacaaggatattgaagaaatctgattctctggaatggatttttaagaatgcttaaataatttgaaaaaccttttcatgcaagatatgcccggagaaattgcatattactatatatagtatgttttaaaaaaaatactgccaaatattagggtttgacggaaaaatggcttgaaccacgaaagacacttatgagaagatgcgaggcagataaaagcacagacacatgaagtttaccatttccaagcaagtatttctcgacgggctgagacaggttgccagcgtcgtgtcttccaagacgacgctgcccattctttccaacgtcaagattgaagctgaaaacggccaggtacgttttacggctactgatcttgatgtatgcattactggcgtggttcccgcaaatgtgctgcgtgaaggcaccgtgaccctgcccgctaaaaagctggtgagcatcatcagcgaacttcctgaagccgaagtccaggtggatgtcaaccaacgcaaccaggctgctgtggagtgcggccgctcccagtttaaactgaacggccttccggcggatgaatttccggaattgccgtcttttgagcaggctactgtgtaccaggtggagcagaatatgttgcgcgactgtatccgccggacggaatatgccatttccacggatacgacccgctacgtattgaacggcatttccctttctttccgcaatggtaaaatgactttggtagccacggacggacgtcgtttggctttggcggaaaccgccctggaatttccggaagaacagcaactggacgccatcctacccactaaggctgtcggagaactccgccgccttctggatgaagtgggaaccgtcactatccggttcacccgcaaccaggcagcctttgaaatcaacgatacgctcttaattagcaaactgattgacggcaattacccgaactaccggcaggtaattccgacggattgcaaggaaagtatcgaacttccctgcggggaactgctggagacagtacgccgtgtttctctcctttccgtggataagagcacaaatatcaagctgaattttcgtgaaaacgaactggaagtggcttccagcgcagaaggagtgggcgaagctcatgaatcgatgacaatcacttattccggaaggccgctttccatttcctttaatccggatttcttcatggctcccctgaagacgatggccggggatacggtcattacgctgaaccttattgatgaaatgagtcccggcgtcttgaagattggcgatgagttcctgtatgtgctcatgccgatgagatctcccaattgattttggtggcacaaaatcgttcatacagaggaacaggcgttgtggagacatgacgcctgttttttattggctgagaatgaatggaaaagaaatattattcacataaatgttctacgtggaacattttttattttccattacaggaaaactgtaatctgccttgaaaagacggaacacctgcatggagcgcaaggggcatcaccggaaacttctgcgacgacggaagaatgccactatccggaaatgagaagatgcaaggacaataaatattcagagcggagaattgacaaattttactccgtatcactcgcccagcagacccggaggagcgaacaagtccggagcaagatgaaagggataaaaaccggatgcttgaagaatggcttcacggacggaggatatggaattgaaacaggaatgttccacatccagaatacgtccgtccttcagtttaatcatcaatccgggttctgcctcattatttggagtgcatcctatgcgttcaattaattcccacggtatttccctgcgtgaaatgctgttgccccagaagatggaagaagaagtgattgtgagaaaataaggcctgcccataataacgggaagccacaggaacagtaaaagggcgccgagaagaaagttccaccagccggaaccgaaaaaagcccaggccaggctgcaccccagggttccgaggattctccctcccagccgataactgcggtagaaataataagtgttcatgagttgcgaagtcaatgaaacgtcagaccgaccatggaacaataagttcccgaccgtattctatacgataccgctttatcccggcaaagacaaggtgataagtcaggaaatccagttcagcatgtcaggcggtacggaaccgcaggaacgtatcagggaaagaaaatactcttccatttccggcggcggaggaaaaaggcccggcaaaactcggccttcggcaagttccagagctccctggttatgaagagccaggggcggatcaatgtaacgcatttgcgtagggtccggcagaataaaattaagagggcggccttcgttcagcaggcggttcttcggaatttccggcccccattcatcctccacacccatattggcaagcagaacgccggaagagaagggcatggccgggtcaataagccctgacatggcatgccgctttcctgtagccgtaacggcgcagaaagcgtgcctgattgcgtcagtaagggtttccctgtccgctgccggcacaaaagaggcggaagccagaggttttttttccacgtccgctacaatgacattcagtttccgtctgagagcatgcagagctattccgcggccaacttttccatgtccaatgactaccagagtctgtccctgttcattttttattccaagagcttccagagcccggaaaaaactttctccggttccaaggcaggtttctatctgtttaatctttccggcgtccaccatccacacaggctgcgggcatgccgcatagcgttccgcacccgagcgggttaattccacatacccgcagcggctggtaacatggctgagcgctccggcgcagtccatgaccacatcataaggtccgcctgcccgttccgcttccaccacgggaattccatactgccccagcaatacgactgtatccgggtcatagggcattaccggtgagaccgctactgtcagctccgctcctgcggccagaagagaggcgtatttggcgcaggtattccggaacacgggagaagcgtcaataatccggcatccttccagagggcgactttccgaccacgttttatactgatgcaggagaacgggaaattcttcctgccggtaaaaggggaacaaattttccagaatgcgctccggagatgcaggcataacaaaaatcttagggtttctcgcagcagagggtaatccctatcctgtcgttttcccagaaaaactttgttaaagaaatatcttttgtttaataatttttaaaagctatagccagtccagggaagacaaactgctaagttatctatattcgcttgcaggtattttatgtgcgtgtcgtggcatgcctgagaaaaatcttttaactgcattcttcactttgtttgatgcaggagtattttttttgcgtagaataaataggatagcaactgttaatgtggtcaacatttccgacagacaaagtgctagccacgcaccgttcgttcccattgcttcaggcaacaggataaagcatgggataaggaaaacaaatcctcgcaacagggcaaacaaattggcgagttttacatttttcacgctttggtaataaccgatgagcatcaggttgatgataaagaaaacaaatgccagggagaaatatggaaatccctcaatggctatgagcgccgcagtgttgtccggattgacgaacaagcctaccagaatgtgcgggaacaaaatgaatgctgccgtcgtgactatgccgcaaataacggaggtaaataatgcgatccgttttgtatcggctacgcgctttttctctccaagcccgaagttataactgatgatgggttgtgctgattgcgctatggcattgccaaccatgaatacgaatggaaggtaataacaggcaatgccgaacgctcatacgccgttgtctcccagatattttataaagatgtggttcccgacgaacataaacgtggccaatgtcgcttcagtcagcaaagcggaagaaccaatgcgacattgacagacgatattaaggagggagaaccgaaaacttctgatgctccatttaataggataaagccgcagtttatgtgcaaatttccataaataaataaggcccgtggcgccgctcgcaaacagtgctatggttgcggcgaaagcagctcccgtcaatccccagcccaatggaaagataaacagccaaccgagtattacggtgatgattgcagcaatgatattgcacatcatagccaacttcggagcgccatccaaacgaatcatgaataggcagacagagcaccacatctggaatatcaacgaggggatgaaccacaacaggtattccctaaccatgggggtaagatgttcggaagcgcctaaaaatcgggctgtagctgacggatatgccatcatcaaggcagatggcacgatggcggcaatggtgacgaacaacaaggcctgagtgacattaaggcgcgctgcccccagttttccttttgatagctgaatggaagcgactacggatgagcctacgcctgccatgagccctatcccggtaaacagcatcagcaggggaatgcatatattgatagcggcaatgccatcgcttccgattccgtggccgacgagtattccgtctactgccgttactgccgatatgctaagcatcccgaataaggtcgggataaaatactttctgaataatgtgcatacgtccagtgtgcctaaatcaattgcatttcttttcatatgtgtctgttattcttatggctattttttgccgggaaacaaaaaatgccggataaggtgattggttttacccagtcatcttatccggcatttttatttgccctccgatgaggattacaaaacgcttcttttcgttgtgtggtcgtaaaaatagtgcaataatttaggaaatataatttttttatacgtcatgttaatgctttggaaaaaatgggatagaaaaaagactgctttccgggcagtctttttaaaatagtttgtgttttaaagggggcgttttcccggtaggctattgtttatggccttcggattcctgttgttgtgcgggagggattttctgcgcttccggcacggggagcggcgttttctggatggtaacgggcgttcctatgctggtttgcctgtagaggatttccgcaacatttcgcggcaaacggacgcagccatgggaaacaggatgccgccgaactttccctacatgcaggcccaaccccgcgttggtaagacgctgccaataaggcatgggagagccgtcaaaacgacctccctccggtatgggatccgtggattcggcattgtagttgatgcatttgccttcggcatcatacattttgccgtagaggttggaagcatggtcttcctttttggagataacggtgtagtcccccgttttggtcggataggcttttacgccggaggagagggggaagtccatggcgaccaagccgtccaccagatactggccccgttgttcgtccaggcagacgaaaatttttcgggattttttcggctggcggttcagcaaggtatcgtccttatagacgtcgtacgttttccggtagtccttgcgggctacaaaatgagcgtatgtggaaggatgaaacgggtttttatattccggaacggatttgtccacggcacgcggatccggcagggccgcatggcccgtgccggagtgggaacaggacgcccaccccatgagcaccacggggaaggcggccagaacaaggagaggcttcataagtggtggaaccgggaggatcccccggattacttggaacgcggaatcgtcaacttctggttgatgtgaatcagatcggacttaaggccgttagcccttttaagggccttgacagaggtgccgttcctgcgggcgatggctcccagcgtatcgcctttcttcacggtgtaggtgcgggccttgggagcggatttacgggaggagctctttctggcagccgtgctgcgggaggatttgctgccggccgtgctcttccgcgcggatgattttttagtgacggaaggcttggcggggggattgtaagcgtagctggaagaactctgaaccgggctgtaatggccggattcgtaagcgggatcagagctttccgcgatccacggcgggatttcgccgctggccggttccgcagtgtcgtaaccggccgtggaggaattctgggtggagcaggaagagagggggaataccagcgcggcagcgcaggcgcaggttaaaatgaatggcgttttcatgtgtgccctgttcatactaatttatgatttcggattcaaggcggtagcgcggattgtcgggattttttttcagaccttgcccagattataaaaggtttccgcatttcgggtcgtcacatgggccagatcttccaggttcatgcctctggcagcggcgatgaaacgggctgtatgaatgagatgggcgggttcgttcatgcggccccggaggggttccgggctgagatagggggagtccgtttccagcatgatacggttttccgggcaccagcttgcggtttccgccactacgggggcgtttttaaaagtagccaccccggtgaaggagaccatgccgtccagttcgtcaaagatccgcatggcctgagcggtatttccgatgaagcagtgaaatacgggacgcacgcggcccgcgtagttccgggcaatagccaaggcgtcctcaaagctcgcggaacctttccggtcccgcgtatgcaggacgatattaaggcccaggcgctccgccaggtcaaagtgccgttccagaaggtcctgctgaaggcggtggaattgttccgtttcccagccttggggcgtcccgtggaagtaatccaggcccgtttccccgatggcggccaggggaacgtcctgcgccttccggaaaagctggtccgcccagtctgccggggcgtcatgggcatcgtccggatggatgcccagcgcacaaaaaaccgcgccgggaaactggcgcgcccacgccgtgtttgcctcccagtcatccatccgcgcccccagcgtaatcatgcggtcaatgccttcccggagggcatgctggacgtaagtttccctgcgggactggtcgaattgagcggaagccagatggcagtgcgtgtcaataatcatggtgtaagggactgtggcggaacggatgaagtttgtggatatttgccggctttgaaaagtgcaaacgcagagcatgcctgatttttccttgccacgcggaagtgaaacgcacaaactgccccgcatgaaatgtacggctttgtgcatgtgcgccgccctgctgccggtgggcttcctgcaggcaggaacccagcagatagaagtgccgcaggagggctccgttatcagtttccatctggaaaacgatatgttcgtgggggatgatgataattataccaacggcgtccgctttgcgtggatgtccggcaccacgtcccgaagccatacgttttccggcatgctgggaacagtgctgggcggcacgaacgcctcggattcctggcggcggttcatgggcatgagcggttccgccaacctgcgccagcagtggggcctggacctgacccagctcatgtacaccccggagcagaaggccacctatcccatctacaaccagcacccctatgtgggcaacctgacgctggggctgacctccctggttaagaatgaagaccgggccaattccctggagctgcagctcggcaccacgggcacgaattccctcgccaagggctcccagcatttcatccataagctgtggggtatggagcaatggcccggctgggccaaccagctccccggagagataaccgccaatttgtttttcaagcggtattaccgcctgcgcggactggagaagcgctacggctccggttttgaaacggatgccctggcttactggcatgcggacgccggcacagtaaaggtgcaggcggggggcggcatgtccttccgcttcggctataatctgggcaatacttctccggagaacagcattcgcggcgcgaccagcgcagcgcctcccttcgtttataacaggatgtccgtttccaattgggggtattacggttatattcatgctgccgtgcgagccgtggctcatgacctgtatctggatggtacggtgtttcgttcctcccccaagtatgtgaacaagtatcccgtagtgggagaatggggttatggcttcggcctccggtacaagcgctcggaattgcttttcggcctgcattacatgaccaaggagtacacccagcaggaatccatgcagtgtgtgggcgttctccagctccggcatactttttaacggctgcgtttgcaggccgttcataaacgcaacagcagcttgcaaagggcaagtttgctgttagaattagaattgcggattcgtatgtaacaggacaatccgtttgtgcatatcaactccgacacatattgatttcatgagaacgaccagatcctggcttttatcctgtaccgcgctggcggtaagttccgccatgtgcggcctgggagcaccgggcgattccgcccccgcgccagcccccacagggctggaatgggaacaggaacaaaacctgcatttgaataaggaagctccaaccgcctttttcgcgtctttcagcgatttgcagtccgccttgaaagtgctgcctgaaaacagtaaatggcgcaggtccctgaacggtcagtggaagttccactgggcgaaggatccccagagccgcccggtcgatttttacaagccggattacgacgtaaaggactggaaggagattaaggtgccttcctcctggcagactcagggttacggcacccccatttattccaatcagccgtatccctttgaacgctcctggccttatgtaatgaaggagccttccaacaagaattatacgtcctacaaggaacggaaccccgtaggttcctaccgccgcacttttgaagtgcctgcggactgggacggcagggaagtgtacatgcagtttgacggagtggattccttcttctacctctggatcaacgggcagtatgtaggtttttccaaagattcccggaatccggcccgttttgacatcagcccctaccttaagaagggggagaatgtggtggccgcagaggtgtaccgccattccgacggagcatatctggaatgccaggatatgttccgcctgtccggcattttccgcaatgtttccatctttgcgctgccgaaagttcacatccgcgactttttcgcacaggtcaatccggtggaccagagggattgggctttgaatattgaccatgccaaaccggggaccgtggacggcgattggcgccttcaggtggatgtggatgttcgcaatctgtttccggcaacggaaaagctggacggctgcacggtttccatggccctttatgacgctgccggaaaactggtagaacctgtcaagcccaaggatgcgccatatgacggcgtgttggaaaagcccttgcgcattaccggcatgaaggattttaaaacttccctgctgggcatttattccaaacccagactatggtctgcggaggagcccaacctgtacaccctggtactgacgctgaagcgtgacgggaagacggaagaaatggtttcctcccgcgtgggtttccgcaatgtggtgattaaggacagcgtgttcctggtaaacggccagccggtgaaggtaaagggcgtgaaccgccatgaaagccatccggaaacagggcattacgtgactccggagcagatggaggaagaagtgcggatgatgaaacgcgccaatatcaaccacgtgcgctgttcccattatcccgcggatccttatttttattacctctgtgacaagtacggcatttacgtgcaggatgaggccaacatcgagtcccacggctattactatggcaaggagtccctttcccatcccattgagtggatgccggcccacgtggaccgcatcatggcgatggtggagcgcaacaagaaccatccctgcgtgattatgtggtccctggggaatgaagccggccccggccagaatttccgcagtgcggaaaagatggtgaaggccagggatatgtcccgccccacccactacgaacgcaataatgacattgtggacctggggtccaaccagtatccgtccgtggactggacgcgttctatggcgggcaacaaggattttcccaagccctactatatttccgagtacgcacacaacatgatgaacgccatgggcaacctggcggattactgggaggccatcgagtcttccgaccgcattatgggcggcgccatctgggactgggtggaccagggcttgtacaagaccctgccgaatggagaaaagatgctctgctacggcggcgatttcaacgaccatcccaatagcggccagtttgtgttcaacggcaccatcctgtcggatcgtacgccggaaccgggttattttgaagtcaagcacgtctatcagaatatttccacatctttgacggacaacggcaggatttccattttcaacaagaatttctttacggacctttctccatacgacattacctggaccctcacggaaaacggcaatgcagtggctgaaggcaggctggacacgcctccggccggtcccagagaaaagattgtggttcccattccggacattccccagttgaaaaaccggaaaccgggggtggagtatgccttgcgcataagttacaagctgaagaaggacagggggtgggccaagaagggatatgaattggcctttgaccagctccagcttcccgtgcagggagatctgcctgtgttcaaggctcctgcgggcaaagtcagcctcagcacggacaagcataccgtttccggcaaggatttttccgtgcagtttgacgcggccaccggggaactggcccagttcacggtaaacggcaagcctctgtttaaaacgcccatggcggtgaacgccctgcgcgctgcctccagcaatgagccgggcgtcatggccaagagcatggctaacggcctccgtgaactgaagcatgaactgctcagttacgaagccattgataacggcaatagcgtcaccgtcaaacaatccatcaaggtgagcggcaaacaggctgaaaacatcagcggctacggcgataccaagaccaccatcacggccaggaagcaacccctgaacgatacgaacacccatttcatcaataatttggaatggaccatctatgcggatggaactgtcgtctgccagtccgtactgcttccgcgcggcaatcccctggaactgctgcgcctgggatacgaactccagttgccggcgaatatggacaacgtagcctattacgggcgcgggccggaagaaaactatgcggaccgcaagagcggcatgcctctgggcgtgtataaaacgacagcctgggattctttcttcccgtacggcagaccgcaggattgcggcaaccatgaggatacccgctgggtggccgttacggacgacaaggggaacggcctgcttttcggttccgtgggcgcaccgttcgctttctccgcccttccgtataccaccacggatttgatcctggcaaaccaccccgtggaactgccgaagacgacggataagaccgtgctggttctctcttccgccacgcgcggcctggggggtgcttcctgcggtcccggccccatgggcagggacatcatcaaggccaacaagccctacccgatgtccttctttatgcggcccattaccgccaagtcctacaagggggaaatccgcgtgcctgcggcccggctggatatgaccatgctgacccgcacggacaagtatacggtcaagagcgtaaccagccaggagcagggcgaagcggacgccgaattcgccattgacggtgatcccggcaccttctggcactctgaatataataaaaccgtgaccaaacatccgcatgtactggtcgtggacctgggtaaggagcgggaattctccggaatcacttatcttccacgtcaggatggcggcagcaatggccgcgtgaaagattattccgtggacgtgagcacggacggagagaaatggcagcctgccgccaagggctccttcccggatagtgctgacctgcaggaagtgaaattccaggctcccgtcaaggcgcgttatttccgtttttccgcccttagtgaggcgcaggggcgggattacgccgccgtagcggaactggatatcattcccgttaagaaataactcctgcggtttttaccgtttgaacaggcgccccgccgctctttccgagtgcgcggggcgttttatttgccgggctccatgggttttctggagggaaaatgcagaagaagatggaggatgaacaattggcagaacaaaaaaccctgtacggaaaatacccgtacaggggtttgatgaaaagggaagcttctatttccgtttacggcgtaccatcagggccgtcaaacccagcaagctcatggtggctgtcgcgggttccgggatcaaaagctggatggtattgttttgcagattgatgtttcccaggatgcattcggtgtagtagtcaagctcgtttgttagagcctgctccttggtcgtaagccacagatcgaacgtctcggtgccggatatatctatattatcgtaattaagcagactgtcgctggatacgtctttaaagacaaaaagagctgtttctccatcctgtcccgtcaccattagataaaccggggatgtcagagaagaagagtaatctccggacaagttaaatctgccgtcagcgacgccgccattttgctcttccggtatatttgtcaacgcgctggtgaagttgttctgcatgctcatcagatcactgtatttcagttgatcctgtgcatacgaatttccttggaagttccatcggctggtggtcacatcataactccaagtaccgctgctgaaggtgcctaaaatggcattgcctgcattcagcggttctccgagagaattgattagggaatatgcggaggaatcgtcattgctgatattgaaactgtccgctaaggcaatttctccagaaaagagagtgcaggcggtgaaagcattggtgaaaagggagcgatagaacatggctggttatttgttggtttgatgtttgctggacaccgtgatgtaggaaggtgtcttggaagattcgtagtagatggaaaaaactccgctgaaggggatattggaaacatcctctccattgtcctgacgtttccaggaaccgttgttgttgacgaccttgaccatggcatttttgtcatctgcgggaatgttgatgacggcgtcatcaggcaattgcaaagctatttcagccaaagtctgggaaaggggcaggcgagtgtgaagaagggaattgaatgtgggaacgaccagcttctgattcttcagggatacttccccaatgaccacagctgtaacatcggaaccagctttgcgcgtaatggtcaggggttcatggctgaacaccggcatattgccgatattttccgtagatccccttcttctccattcatttccagaataataagcggcaagcttggtggttgccgaattaaagatattaaccgtgtctgcagacatggcggagccgcttttcaggccaaactggttgtcttctccaagaatatcatccagagtgcgcgccttgcgcaggacatataaatcggggggagtgcccttgcttaccagatcagaaagaaggcggtcatccactttaatggaatgctccgtccagctggctcccggttttttccaaccatcccggtttaagggaagagctataacttcattgccgaagtgaagaaccagcacataggcggagttttcattcatcaggtcgttgaaattaacgtccgggtccgtgatggtgactttattaccggaaatagtaatgttgccttcttcaagggtgtgctgtaccaaggcttccggatgcacccctaaacccagataacccgttgctttggcgtacagggttgtctggatatagccgcagggcgtactgtaagccgtttccgcatgcagggaggcgattgttgccggaagcaacgcgcatgcgcagagagaggctggcagacaatgtaccggattgataaacattaacccattaagaagaaaggaaatcgtttgtcaattaggaaagggggaaacattcccgtttttcatttgtcagacttttccccggatggaggaagctttcaggtttgtccgggggatggccccgggatttgaagcgcaggaagggctgccgccgcttttttcaatgcctccggaacagtaacttccaatggccggacacaggaaaaacaggacggaggcagggtggtagagatacggtgcggaacctggaaggggaaaatcatgaaaaaaagatttcaggaatgcttggcagaggaaggggtggggagagcctgaaaacaggggagaggatttaataaaattttaatgttttttccgggttgttttatttgcgccctgaacgttcttccattaggttgattccaacattcaagccggatatcattccgattcctcttttcatgttttcagaaacgcattcggacagccagcgggcggacaggattctggcctccatccggagggaggaagcccgtcccggccgcggcttgctgaaaatcttctttggcatggcgccgggagtaggcaaaacatgcgccatgctggaggcggccattcaggcggcggacaagggcgtgcaagtcattatcggcgtggcggaatcccatgggagggaagatacgatgcggctcattggcaggctgccgtgccttcccatgaaaaagatggtttaccggggagtggaaatggaggaatttgatttggaggaggcattgcgcgtgaagccccagcttattctggtggatgaactggcgcataccaacgtcccgggaatgcgccacaggaaacgctatcaggacgtggaggatttgctggccgcgggaatagacgtttacaccacgctgaacgtgcagcatctggaaagccgttccgataccgttcacgacattacagccgcccccgtgcaggaaaccgtgccggattccgtattggcggaggcggattgcatccagctggtggacattactccggatcagctgcggacgcgccttcgggaggggaaagtgtacagcgctccccaggcttccgccgctctggatcattttttcaaggagtccaatttgacggccctccgggaactggccctgcgcatcgtagcggagaaggtggaccatgaactgacggaggtgcgtaccatttccggggaccgctctatctggcgcagcggggaacgtctgatggtggcggtaggccccagcccgttttccgcccggctggtacgctggacgcgccgcatggcttatgccctgaacgctccgtggatagccctttccgtagatacgggcgtgcccttgcctcctgaacagcagcagcggctggacgccaatctggaattggcgcggcggctgggcgcggaagtgatcgtgatgcccggttccgatttggcggaaacgctgctccgcatggcttttttaagaaatgtcagccaaattgtggtgggcaaaccgcaggaaagctacctgtggggcctggtgcggcccatatccctggtggataagctggtgaagggaagcgaccagattgatatttacgtggttcccgccgcttcgggaccgggccgtaaccgttggaagagctggcaccggaaaacggagaaagatggccgggattactggctggccgcaggcgtgacagcggccgtcacgggtgccggcctgctggtttccgcatttaccggttattttgctcccggtttcctgtatttggccggagtagtggggctgggctttttcatccgttcccgctgggccatgcttctggccgcggcgctgagcgtcctgttatggaacctgttgtttattcccccggtgatgacgttcaagatagagcggctggaggacgccttgatgtgcttctttttctttttggtggccctttctacgggacggctcacttcccgcctgaggatccgcgagcgggaagaacgggaacgggaaaaaaagaccaatgccctgttcctgtattcccaggccattggatccgcttcggacgtgccttccctcatttccgtcgcggcgggacagatcagccagattatgggggtgcgcctggctgtcatgacgccggaaggaggcggcggtaagctgaggctttgggagaccggcggagagtacgccatggatgagaaggaatggagcgtggcagtctggtgtatggaacaccgccgccccgcaggaaggtttacggatacgatcccggtagcagaagggttttaccttcccatgatgtccggggagcgttgcatgggcgtgcttggcgtgaggccgggggaaggggagtgcctgacggccgggcagaaggatttgctggaaagcatgggagcgcagctggccatggcgctggagcgtgaagaattgagggcggaacgggcgcgtacgcggcttatggaagaatcggaaaaactgcaccgatccctgttggacagtgtttcccatgagttcaaaacgcctttggccgtgattgagggcggctgtgaaaaattggccgggcgcgccgcgtccgcgcctgaggagcgggaagaatacggggaaattttactggccgcgcgccgtctgcgccgcctggtgaagaatttgctggatgtgagccgcctggaatccggcgctttgaaacccaaactggactggtgcgatctgggggatgttattgaaggggctctggctgctaccagggaagcacgccggaatcatcccgtgtctgtttccctgccgccggactatccgctggtgaaggcggatttttccctgatggaacaggtactggtcaatctgctgttgaatgcctgcgtacatactcctgagggaacctctgttacgttgcaaggtggtgccgaccccgtgcgcggccaggtttggctggatattcatgacatggggccgggcattcctcccgaacgggcggaaaccatttttgagcgcttccggacgacgcggcccggtggtttgggcctggggctccccattgtgcgcgggtttatggaagctcagcgcggtgccgtctccctggttcccgtttccgccggaacatgtttccggcttgtccttcccctggtggagcacgatagtgttcctgaagagtaattcctcctgcctcatgagcaactttcctgcagatatcctgataattgacgatgaacggcagatacgccgtcttctgaacctgacgctgaccggcgcaggctaccatgtccgcgagtgtgaaaacgggcagcttggcttgagtgagaccgcgctgaagcggccggatgccattattctggatctggggcttccggacattaacggcctggaagtgctgaaacagcttcgggagtggactcaggttcctatcctgattctaacggcctgggacagggaggatgaaaaggtggatgccttggatgccggggcggatgattacctgaccaagccgttcagcggccgtgaattgctggcgcgcctgcgcgtgatgcttcggcgcaatcgtccggaccgcgagccgtccgtattccggctgggtcccattgtcgtggatctgagttcccggcgcgtggagaaggggaaagaggaaattcatttaacctccaaagagtacggaattctgcgcctgcttctgctccatcagggcaaggtgatgacccatcgccagctgctccgtgaaatttggggcccccagcatgaggaggacacacactatctgcgggtgcacattgcccacctgcgccagaagctgggggattccgatccggaaaaccgcattatccgcgcggaatccggcctgggttacagaattgtggcggatggagccgagtagcccttgtcccgttttactgggctggaaaaaatagcggcgcattatctgcggcagccggaaaatatattttttcataacggttggagaagatgacttaacttcacgcagttcaacatgctgtgtaggctccaagacgtattcaatacgtctttatgaagattaagtacaacgcaagaaacgtaggagccgcagccctgggctgcgccatgatagcaggaaccgtctgcgcaggagaggaaacggtttctccgtcgatagcctccctgacaaacatgcaagaggccgccataccttccacagacgcggactgggccttttccttctcggcggggtggtccagcaagtacgtaacggaaggtctggactgcctgccgggcagcggcatctgggaagtggctccgagcatttcttggaagaatcttacgttcagtgcctggtatgccggaggagattccgccaattacgatgaactggacctggttctgggttacgcctggaatctggggaagtggactgtcaatccctggtatgagcaccaattctattttacgcaggattataatgtggccaatccggcactgacggtctcctatgccgtaacggattggctggctgtaggagcggaaacccaggtgaaagtggaacaccaggattttgaagcctattacagcgcctttgtacggttggagtggtcccccctggaaaatgtgaccgtggttcccatggtcaggtacgggtacaacggcggttataacgtggactatgatgacggctccaactgcattgactggagcctgggtgtgacgtggaggtttgcagaacattatacgctttccggctccgtcaattattcccaggcggctacggtgctgcgtcacagggatgccggagacgaattctgggtgggattccgcctgggcgtggagttttaacggcgcatcggcgttaaaaaacgggcttccggagaggaattaataatttcttaatgtccggaggccctttgttaactacccggaatttccagaatacgcgtagagttgcgttgtgtcctcacacgacttgttaatcattgtcctgttcataggcatactagtctctttcaccccgtttctcggaaaatggctggcaagtgttttgatgggaaggcagacatggctttccccggttctgggtcccgtggagcgctgcgtctaccatatggccggagtggaccccacccgcgaaatggactggaaaaagtatctgacggccgttcttttgtttaacgccgctggattcctcgtcctttttctttccctgctgtgccagaaatggctgcctctgaatcccgccggaacggaaaatatgcggtgggatatagccttgaatacggccatcagcttcgtgaccaacaccaactggcagttctattcaggggaagggccggaaggcgtcagttattttgttcaaatgaccgggctgggcgtgcaaaatttcgtcagcgccggcacgggaattgccgtcatgtccgccctgatccgcgggctggaaaggagatgcgcttctactctggggaacttctggacggatctgacgcgcagcacgttgtattttttggttcctgtttccacggtcattgctcttctgctggtctcccagggtgtggtgcagtcctttgacggacccattgccgtgccgggcatggatggcgtggaacagatgatacccagtggcccggcggcatcccagatagccatcaaacagctcggaacaaacggcggcggctttttcgggaacaacagcacacatccttttgaaaaccccacgcccttcagcaacatggttgaaatgatttccctgcttctggccggctgcgcctgcccatacgcctacggcgtcatgattggaaaaaagaggcaggggtggattatcttcggagccatgatgattctgcttgtggcggccattgtcttgtcccagtgggcggaacatgcgggaaacccgcttttcccgggcatggaaatgctggaaggcaaggaagtgcgcctgggcgttacgaacagttccctctggtccgtcgctacgacggcatcttccaacgggtccgtgaactgcatgcattccagcatgtccccgctgggcggcggcattgccctgttcaatatgttgctgggtgaggtaattttcggaggtctgggctgcggcttgtacggcatgctgatgtttgccatgattaccgtgttcctgtgcggtttaatggtggggcgaactccggaattcctgggcaaaaaaatgggagcccgggaagtgtgctgctccatggtgggtgtcctgctccccggcatggccgtcctggtcatgagcgggctggccgccgctacggaagccgggcgggcgtccatctgcaatgccggcccccacgggctgacggaaatcctgtactgcttcggttcccaggccgggaataatggaagcgcctttgctggtctggctgtaggggatacgcctttttattccctgctgggcggtttggcgatgctgctggcccgtttcggaaccattatttcggtgatgatgattgctggcagcatggcatccaggaaaatttctccgccggcccagggtaccatggggacggataacctgatgttcatggttctgctggtagccgtcgtgctggttgtaggagccctcaccttcttcccggccttggctctgggacctattctggagcatttgctcttgtattcgggaaccatgctttaaggcgtattcgccgataatccggatgtttatgatcatgaaggagaaaaagagtcaatcatggtatgacggagccgtgttgaaaacagctttccggaatgcgttgcgcaaatttgacccgcgcgtcctgtctaaaaacttcgtgatgtttatcacggctgccggcgctctgatggcaacgattgcccttatcagggatttggctgccgggcaacccttcggctttactttgcaaatcgcgctctggctctggttcaccgtgtttttcgccaactttgcggaagcgctggcggagggccggggaaaggcgtatgcggacgctctgaaagaaatgcgcgtttatgtgaacgcccgtttgctgacggacaagggaacggaggaaatcgtctccatttccgaattgcgcaaaggggacaaagtgttgtgcgaggccggggatatcatccccctggatggagaggtgatagaaggcatcgctagcgtggatgaatccgccattaccggggaatccgctccggtcatccgtgagagcgggggggaccgcagcgctgtaacgggaggaacccgtgtaatcagtgacggcattgttatccgtattaccgtggaaccgggccatacgttcctggcccgcatgatttccatggtggagggggccagccggcagaaaacgcccaatgaaaccgctctgggcatcctgctggtggcactgaccattgtttttcttgccgtggttttttcccttcccgccatggccggatacattgaggattctgcccggacgctaggcttcagggcggagggccgtatttccctgcccatcctggtctctcttctggtatgcctgattccgacgacgatcggcggattgttaagtgctgttggtatcagcggcattgaccggcttgtgcgccggaatgtgctggctgtgtccgggcgcgccgtggaagtagccggggacattgatgtgctgatgctggataaaaccggaaccatcaccttcggcaatcgaatggcgaacgaattcctacctgcacccggtgtggatgacctgcagctggcggaagctgcccagcttgcttccctgtccgatgaaacgccggaaggccgcagcatcgtggtgctggccaaaaagcagttcgggatccggggccgccacatggacgcggaccacatctcctttgttccgttctccgcttccacccgcatgagcggcgtggacattgcggagcacgacggccagccggccgtttccatccggaagggcgctgcggaaagcgtggcgcagtgggtgaaggaccagggcggaaccttcccgcaagaggtggaaatgaccgtgcagaacgtcgcgcgggcgggcggcacgcctctggtggtggcgcggggaagggacgtgctgggcgtcatctatctgaaggacatcgtcaagggcggcatcaaggaacgctttgcccggctccgggccatgggcatacggactgtcatggtgacaggggacaatgccctgactgccgcatccattgcggcggaagccggcgtggatgacttcatggcggaagcgacgcctgagatgaagctggcgcgcatccgtgaggaacaggttgccggccgcctggtggccatgaccggggatggaactaatgacgctcccgccctggcccaggccgatgtgggtgtggcgatgaacaccggaacgcaggccgcccgggaggcgggcaacatggtggacctggacagcaatccgaccaagctgattgaaatcgtggaaatcggcaagcaaatgctgattacccgcggcgcgctgaccaccttttccttcgccaatgacgtagccaaatactttgccatcattcccgccatgtttgccggcctctttgtggctgacggcatggccagtggacctctttccgccctgaacataatgggcctgaattccccgcaaagcgccattctcagcactgtgatttttaatgccctggtcatcgtagcgctgattcctctggccttgaaaggggtttcctaccgtccggcgggagcggcctccctgctgaagcgcaatatcctcatttacggggtgggcggcctgattgctcctttcatgggcatcaagcttattgatatggtcatcaatgcatggcgccttgtttgaaaatccaatcctaacctgctgaattatcatgaagtggacatttcccaatctgcgcctgtttctgtctctggccgtcattaccggaggcatttaccctttggtcgttacgctggtcagcctgatttttttccctcatcaggctcatggttccctaatccggaatgaacggggggaaattatcgcttcggagcttgtcgcacagccttttatctccgccaaatatttctggccccggccctctgccggagaatacgctaccatgccttccggagccagcaacctctcctggacttccgggaagctggtcaggacggtggcggagcgcagggcggctctgctgaaagcccacagtctgccggagaaaacgcctgtccctgcggacatgctttttgcttccggcagcggtttggagccttttatctctccggaagcggcggaatttcaattgaaccgtgttgcctccacgcgcggagtgcctccggaaaaaatccggaaactggtgtctgaacacttcgtccggggcggaattttgggggaaaacgtagtcaacgtgatgaccctgaacgctgcgctggatacattgttcccgatgagcgggatgtaattgaccgccccggttcggaaaatatcctggcggaaaaatcgtccggcatcagccggtgccttggttccgcgtctttctccggttaccggggcggttttcttattggatttttgtcagtttggcctaatttgttgaaaaacagagacaataaattggccggcgtgcggtatgctgccggataatcctttcagaatgcagcaatagggggggcgacatcctctcgttagttttattaggctgatatgaagtttcttcagccccaaatgcggctatttacaaatagtcctcccttggcggtgtgaacacatcgacaacctctccgcttcccatcacctcaaaggaacgaggcgtattgtccggtatggcgtagctgtcccctgcatgaagcaacacttcaatattcttctccggcatttccatgttcaggcggtatttgcctgaaatgacgtacccgcattgttcatgcggatgttggtgggtagaggcgaagttgcctttcacatagtacatctttgctgccattgatttctctccgacagcgagcgaatccagtgaaacgcccttgaacactttcttcgatgcgtcttccttgcgaactatgactttattattttttatgatttccatatcaatacgttatcttcagttccatctggatgtttccgcgttcgtatgccgggtgattttccgcaagttccttgaatcccagctttttatatgtgtgtatggcgggtttgagcagggtgttgctttcaagaaaaagaattttcgccttcatgtcctttgctttgtctatagctgcatggcaaagtatttccccgatgcctttgccctgcgcatgagggtgaacggcaagtttcgccagttcataatcatataccgggtcatccattttgcagagggcacaaactccgacgggctttcccctgtaaagggctacaaagataaagcctcctttgttgataatatattcctgcggatgatcaagatagtccagatcgtgcggttctatcttccaatgttgcgtaatccactgtacgttaagtgatttaaacgtattcttgtaacacggttcgtaaggaattaccctgatatgctccctttccctcattttccgggcttctttgacccgttgcagcaggctcttctcagcgagccggtcttcccattcgccgatagctctccacaaatcatggcgcgtttccttggaaatatcctctacggcgacctccacgtctttgcagagctctgtcagcatggcggcaacccttttcccatgtggagacagggcgatgacggtgcgtctcttgtccttctggtcttcaaggcctttcaccaatcctcttgccgtcatttctccaacgatattgctcacggatggatgactgtgccctatttccttagctatgcccgttattgttttctctttcccgccggctaaaacgaaaagcaggggaaaccactttggctttatgtcaatgccgtataattcataaatttgacttgcatcagacgtcacagcatccgtcagcatgcgcagcctgcttccaatggctattttacctgtcctattgaaaaaatccatatctttccgttattaaatacgtaactgattacgtaactaatatgccattatcatgcgagcaagcattttttcacattttagtcttcttgcaggtggggaatatcgctgtatccatcaatggaatggaaaaatccgtctcctgtcagtcgggtaggctgcgaacgtggtatttggcattgccacccttgcccacgcgattattttggagcatgggcaagggctgttcctgcgtttctatccggtacggggctgccgttctttccggaaatattttccttggcgttcaggatttacactattgccgggataccggatgcgccagctccatgagaaagcgggacaggatttccttgtcagggcggactctccaataatccgttgagcgtgcaagtgatattgcggggaatccggaggggcaaaaaatttttagataacaggaaaaatcctgtttttccattcaacggttggagttattcttatgtctaaaataccaacataccatgcttaacaatctaacaacaaaatttcaggaagcgctgatgcaggcgcagcaaactgcaggccggcttggaaaaccggaaatttcttctctggacgttctggtggcgttactggagcaggaaggcggaattctttcccctattctccgcaaagcctcttgcgatccggggctgcttctccaggcagcccaaagggaggtttcccacgaacctactcaaagcggcgccaccacccagccgcagatggggcgtgacctggctaccgtcatgcaggctgcggaagaggaacgcaaaaagctcaaagacgactacctcagcgtggaacacttcatgcttggggcgttggacacgcaaaacaaagtgcaccagttgacggacacctttgggctgaccaaggataactatctggccgccatgaaggaagtgcgcggcaaccagcgcgtgacggacgacaacccggaaggcaaataccagacgctggaaaaatatgggacggacctgacggcccgcgcccgcgccggtaaaattgaccccgtcatcggccgtgatacggaaatccgccgcgttttgcagattctttcccgcaggacgaaaaacaatcccgtcctgatcggggagcccggcgttggcaaaaccgccattgcggaaggtctggcgcggcgcattgtcaacggcgacgtgccggaaagcatgcgcaacaagcgcattgtatccctcaacatcggctccatgcttgccggagccaaatatcgcggtgaatttgaagaacgcttgaaatccttccttaaggaagtaacggattccaacggtgaaatcattctgtttatcgatgaactgcacaccatcgtaggcgcgggcgccagtgaaggggcggtggatgcctccaacctgctcaagcccgccctggcccgcggggaactgcggaccatcggcgcgacgacactggacgaataccgcaaatacattgaaaaagatgcggctctggaacgtcggtttcagcccgtcatggtctccgaacccagcgtggaagataccatcgccatcctgcgcggcttgaaagaacgctatgaagtccaccatggagtgcgtattacggacgctgccatcgtagcggcggccaccctttccgaccgttatatttccgaccgttttctgcctgacaaggcagtagacctggtggatgaagcggcagcccgcctcaaaattgagctggactccatgcccacggaaattgaccagattgaacgtgaggccatgcagcttgaaatggaacggcaggcgctggcgaaggaagaagacgccgacagcaaggcccgtttggaaaaaatcaccaaggacctggccgacctgaaggaaaaatccggttccatgattgccaaatggaaaagcgaaaaggaagtgctggacgccgtccgcagggaacaggaaaaaatagaagccctcaagctggaaagcgaaagggccaaacgtatgggtgacctgacccgcgcgtcggaaatcacctatggcgaacttccggaagcccagcgcgccctgacggaaggcaaggaaaagctcagtaaaatgcagaaagaagatggagggctgctgaaggaggaagtcacggaaggagacattgccaaagtggttgccacctggaccggcattcccgccgcccgtctgcaggaaggggagcgtgccaagctggtgcacatggaagagcgtctgggcgcccgcgtaatcgggcagaaacaggccgttaaggccgtatccgacgccgtgagacgcgcccgcgccgggctgcaggatgaaaacaggcccatcggctctttcctgttcctgggacccaccggcgtgggcaagacggaactcagcaaggcgctggcggaattcctctttgacagtgagaacgccatcgttcgcattgacatgtccgaatacatggaaaaacattccgtcgcgcgcctcatcggggcgcctcccggatacgtggggtatgaagaaggcggtcagctctctgaagccgtgcgccgtcgtccgtactgcgtggttctcttcgatgaaattgaaaaggcccacccggacgtcttcaacgtattgctccaggtgctggacgacggccgcattacggacggccagggtcgtacggttgacttccgcaacacggtcatcatcatgacctccaacatcggcagccagtacatcctcaatgaagccaatgcggaacagagggaagccaaggccctggaagcgttgcgcggtcacttccgtccggaattcctgaaccgcattgatgaaatcatcatctttgaccggctcacggcgcaggaactcaagggcattgtggacattcagcttcagcgtgtccgcaggcgcctggaagccaagggcctgtttttgcgcatgactccggaagctacggctctggtggcggatcatggttttgatcctgtgtatggagcccgtcctctcaaacgggccattcagcatgatcttctggacccgctcagcctcaagcttctggaaggagacttcccggaaggaacggaaatcgtggtacgggaaaaagacggcaaactggacttcaccaaggagaaaagataattgcatttctcggcatgttgccggaaaaacaatgaagggcgtcccctgagagggccgcccttctgatataaagattcccgcttccgggagctgaagaaaatctgctgcgcggttaaatctgggacagagcgtcgtcagcaacggcggcggcgcaaagcgagtgcggccagccctaggagggaaagcgtagcggtagcgggttccggaaccatgttccagcccatggaacgcattaatcccacttctccatccgtcagggtgcgatgataggtatccggtgagatggaatactgcataagggcgtctggatcgctcgtgctgtcaatgtgggccatgctggacccttccgaccatgtggtggggttatagacagtaagccccgtatcgcccagagacaaagtttcccctagggtaaatgccgtattcccatttccggctttttctacgatggactggccttcttggttggttaacagggaatcatacttggtgtacagcatggtgctgtaggttgtggaagcgcttccggattggacttggaaagtgcctgtctgcgtcgccagggaaagaaaaccaacggcatgccccacttcatgggtcaggatgctttgaaaatcatattttcccgtatgctccgccaataaggcggccccataataaagggaagccaaatgagaggtattgcactggatgtaaatatcatagcctgaggtagtccttgtgcttccatcgcgccatacggcctcggccatggtggaaacctgttgtggcttgtttgacaggtagtagtaataaggggaataagcggaggctagggtggaggaatcggctccgtcgtaccaggtgaggcctacgttaagcgttcttcccggggtggaattaatcagggtattccatgtgttcaacgcccgtatggcggaatctatctgatcactggtccaggtatgagtacttgaagaatcaaaaaatcccttctccccggaatctaggaaggtgcatgaaaaagtggagcctatattaactgtctgtacagcagtgagaaaaaagtgcttcccaagcagaaaacagtgcagagaatgccaatttggaatgaacttttcatagataaaaaataataaacccttgaatagcaaaaaaatcctttctgttcaagtgaaaataaatcaagtctgcttctttttcagggaagacgggtcagacaccccttctttttttctggctcttgttgcataacaacaaaaaatgctgaaaataccggcaggggccctcctggtaaggacagtttccttgtaaaaaatgtaacggcgcaagatagttgcgatatgcgggacaggttgttgcgatatttcgccacttgctgccaggaaaagcccctttccggaagcctgaaaagaggttaaaaaaacgcctgaaaacgggtgaattcgcgtgacttttacccccgaatttgctataaaaaactcaccggaaggaaggttgatccgtaccttgaaccggggctattgccgccgctgccatcagctttattttggcgttgcaaagggagtgcataatttccgccctgcgctcgcgcggcactccataaggccggggattgcctgtcgtcaccatccggaacatccgggcgtataaatcagggggagcctcggcgctgtgccagcaccggcaggaccagcgggaattctccgaaataccgatcgttccggaatctttttgtttaccattcccgggtgtcctccggttcggtcgacatctttccctcaaaaccattattttcggcttggctttggcctcgtaatattgacagcccctccgaagaggggcgatttcatatcgcaacaacctgtcccgtttcaggcagtttcatgttccttcatcacaattacccgtctcttctttccatcgctgtaatttcccgccattgctagctttcaccctatttcaactatactgtcccttttcaaaaaggggaagagcgaggggaaaaagggaagcgttcaaaaaaagacgcgccaggatgggggattatgacaaaagagcatctcattgattaggtgtgtattaagggtggttgcagtgggtatggcctgaataaggatcgggaaaaaatgaaaaaacgtctcgaaaaaaattgacaaaaaggtgtggtatggtagatttctcggcacgccaacacggcgacgggatgaaaagcccggcggctgaagggctcggaagagtactggaagcggctggagccggccacccggaaagagccccggaaaggggtgcgataagaagatttcaagggaatgactaccaaaaaccgccgagggttttccgagtgagccgagaggtgagcgaggggacaaggcccgaaggagcgacctggctctgagaggtgcggtttggtagaagcaaggggaaagaaaaaaggtcgtgacgcgcgccgtgcgaggcagagcgaagaggtcttcaagagacacaacttgaaggaagagctggctgaagcatggcgcaaatgaaatcgcaagattccatttggtccagcaatttcaaaaattaatttgatggagagtttgattctggctcagaacgaacgctggcggcgtggataagacatgcaagtcgaacgagagaattgctagcttgctaataattctctagtggcgcacgggtgagtaacacgtgagtaacctgcccccgagagcgggatagccctgggaaactgggattaataccgcatagtatcgaaagattaaagcagcaatgcgcttggggatgggctcgcggcctattagttagttggtgaggtaacggctcaccaaggcgatgacgggtagccggtctgagaggatgtccggccacactggaactgagacacggtccagacacctacgggtggcagcagtcgagaatcattcacaatgggggaaaccctgatggtgcgacgccgcgtgggggaatgaaggtcttcggattgtaaacccctgtcatgtgggagcaaattaaaaagatagtaccacaagaggaagagacggctaactctgtgccagcagccgcggtaatacagaggtctcaagcgttgttcggaatcactgggcgtaaagcgtgcgtaggctgtttcgtaagtcgtgtgtgaaaggcgcgggctcaacccgcggacggcacatgatactgcgagactagagtaatggagggggaaccggaattctcggtgtagcagtgaaatgcgtagatatcgagaggaacactcgtggcgaaggcgggttcctggacattaactgacgctgaggcacgaaggccaggggagcgaaagggattagatacccctgtagtcctggcagtaaacggtgcacgcttggtgtgcggggaatcgaccccctgcgtgccggagctaacgcgttaagcgtgccgcctggggagtacggtcgcaagattaaaactcaaagaaattgacggggacccgcacaagcggtggagtatgtggcttaattcgatgcaacgcgaagaaccttacctgggcttgacatgtaatgaacaacatgtgaaagcatgcgactcttcggaggcgttacacaggtgctgcatggccgtcgtcagctcgtgtcgtgagatgtttggttaagtccagcaacgagcgcaacccctgttgccagttaccagcacgtgaaggtggggactctggcgagactgcccagatcaactgggaggaaggtggggacgacgtcaggtcagtatggcccttatgcccagggctgcacacgtactacaatgcccagtacagagggggccgaagccgcgaggcggaggaaatcctgaaaactgggcccagttcggactgtaggctgcaacccgcctacacgaagccggaatcgctagtaatggcgcatcagctacggcgccgtgaatacgttcccgggtcttgtacacaccgcccgtcacatcatggaagccggtcgcacccgaagtatctgaagccaaccgcaaggaggcagggtcctaaggtgagactggtaactgggatgaagtcgtaacaaggtagccgtaggggaacctgcggctggatcacctcctttctatggagcaagtgcacggaagtgcacaggtcggatctcttcccgaggggagagaaagcggaacccgcgagggcccgcaacgaaccaaagatgtgtaaacagccggtcgcctggagcgaagcccggcacgacgtgcgtgacgaccttttttcaccgagaaccgcaactgggggtatagctcagttggtagagcgccagctttgcaagctggatgtccggggttcgagtccccgtgcctccaccagtttcgggaaagagacccaaagccgggcctgtagctcagttggttagagcacgcgcttgataagcgcggggtcacaggttcaagtcctgtcaggcccaccagcaaaatcgattattgagggaaagcgaaaattgacatctgcgtggcaaagaaaacgattgctgagaagcaatcgctttccaacaaagtgggtagttgaacaacaactacaaaacacaagataaacatgcataccaagcaatgagacaatacagtaagtcacgaaagggctttgtggtattgtggaagtggtaacagcttttgcaatatgatgaagtaagtaagggcgtacggtgaatgccttggtgccaacaggcgaagaaggacgcggcaagctgcgaaaagcctcgggaagctgcaagcaagcgatgatccggggatatccgaatggggtaacctgatcgaggcaatactcgatcgttcatacctgaatacatagggtatgaaacgcgaaacccgctgaagtgaaacatctcagtaagcggaggaaaagaaagagaaatcgattccgtaagtagtggcgagcgaaagcggatggagcccaaaccgaaggtattccttcggggttgtaggaccacgtcatattcgaccatactggatagtagaacagcctggaaaggctggccggagaaggtgaaagccctgtagacgaaatccagagtgggaattagtggtatcctgagtaatacatcacacgtggaacgatgtatgaacccgcgcggaccaccgcgcaaggctaaatactagttggcgaccgatagtgaacaagtaccgcgagggaaaggtgaaaagaaccgctgtgagcggagtgaaatagaacctgaaaccgtatgtctacaaagtgtcagagcagagcaatctgcgatggcgtgccttttgtttaatgagtctgcgagtcagtgtttgtggcaagactaagggcttccggcccggagtcgcagcgaaagcaagtccgaacagggcgcaataagtcgcaggtactggacccgaagcggaggtgacctacccttggccaggttgaagcatgggtaaaaccatgtggaggaccgaacaggtgaacgttgaaaagttctctgatgagctgagggtaggagtgaaaggctaatcaaaccccgtgatagctggttctcttcgaaatgcatttaggtgcagcgtcacgtgctgatgcgcgggggtagagcactgacaaggctagggggcacacccgcttaccaaaccttatcaaactccgaataccgtgcaatggaacgtggcagtgagacagtgggggataagcttcattgtcgagagggaaacaacccagaccagcagctaaggtgcctaaataacgctcagtggaaaggatgtgggattacacagacagtgaggatgttggcttagaagcagccaccatttaaaaaatgcgtaatagcttactcatcgagtgatcctgcgccgaaaatgattggcgatcaagcgttataccgaagctctggactttgccgcaaggcagagtggtagaagagcgttgcatgcgcgtcgaagggcgatggcgactgaccctggagcacatgcaagtgagtatgcagacatgagtaacgttaagccgggtgaaatccccggccgccgtaaacccgaggtttccagggcaacgtgtttcgtccctgggttagccgggacctaagccgaggccgagaggcgtaggcgatggacatcaggttaataatcctgagctcgcaacccttaaactggggggacgcatgagaaaagatgactaggttattgaattccgagttgagtccacggactcagcgcatcattggatcgagtgccaagaaaagccccagcgtatgctaagcgacccgtaccgcaaaccgacacaggtgggtgggtagaatataccaaggcgtaagagtgaaacctggttaaggaactcggcaaattagccccgtaacttcggaagaaggggtgcctgcagcgatgcaggccgcagagaaatggcccaaccgactgtttatcaaaaacacagcactctgcaaagacgcaagtcgaagtatagggtgtgacacgtgaccaatgccgaaagattaaggcaaggggttagccgcaaggcgaagctctaaacccaagtcccggtgaatgtcggccgtaactataacggtcctaaggtagcgaaattccttgtcgggtaagttccgacctgcacgaatcgtgaaacgagttgggcactgtctcaaccaggcgctcagtgaaattgtagtggcggtgaagatgccgcctacccgcagaaggacggaaagaccctatagaccttaactgtaagctgtcattgtttcttcggttttaatgctcagagtaagtgggagacgctgaagacgccctttagggggcgtccgagtcatcaatgagacaccaccctttgaaactggaggatctaaccctgagccgtgaatccggccagaggaccgtgtcagccggtcagttttactggggcggtatcctcccaaagagtaacggaggagcgcgaaggtgggctcagcccggttggcaaccgggtgtcgagtgcatgggcataagcccgcctaactgtgagaccaacaagtcgagcagatgcgaaagcaggcccaagtgatccggcggtagaaagtggaattgccgtcgctcaacggataaaaggtaccttagggataacaggctgatcacgcccaagagttcatatcgacggcgtggtttggcacctcgatgtcggctcgtcgcatcctggggctggagaaggtcccaagggtccggctgttcgccggttaaagcggcacgcgagctgggttcagaacgtcgcgagacagttcggtcctctatcctctgtgggcgttggaaaattgaggggttcagaccttagtacgagaggaccgggtctgacgcaccactggtgcatcggttgtactgtcaagtgcatggccgagtagctaagtgcggacgggataagcgctgaaagcatctaagcgccaagcccttcccaagatgagttttccctacaggttcgtggaagaccaccacgttgataggtcgcaggtgtaagtgcagcaatgtattgagccgagcgatactaattaccaattgacttcatcatattacatcactccccgtcgtgaatgaacacttgctcttgtctcattctgttaatgcatgatctcaaccaccagccacgcagatgtcagtttacgctgaatatcccccccccagaaatcttcttagcctcatacaacccaattaaaaaatctcacactcgaaagccccaatgctgggctcccgggcaggcaggatgaagatacaataaaacctcttccccctgaagcccggtggccagagcgcagtggtcccacccggtcccgttccgaacccggaagtgaaacgctgccgcgccaatggtagtcggacgataggtcccgcaagagtaggtcgccgccgggatttttttccatcaggccccgccagtccctcgactcgcggggcctgttcttttcttgcattttcctattttcccctttaaattccttgtaagaattcctccctctgcctcttttagctggagggagctcatgaggtcggtttttgaatccggttgtttctgttcacaggatgcaataggtagcatataagagttttctattattctttaagtgcgtttcacttcgtggaagaactcctattttctctgtctgaaactgtgaacatttctctttttcaaaaaattagctcgacagcggattcaaaaaccgctatctgtcatgcattatggctaaagtatttttttctattcttggaactatggctgctgccggcgttgcgttaggcggcaccactcttacttatgattcattgttgcaatcttcggagggatgggagttgtctgtagggagaagcggccgcaatacgattcaaatagctaatggaacagcttcctgcccttcctctaactggggacaggccgctgccgtcaccacgctgagtgaaggtatcctgctggcaaatgaacaggatacatttacattttcttttgatattaccactaatggaactacaaacgctgccgccatggtatcgtttgtaggttcggaaacggctgtctgcctgggaacgagcacctataacggaacaatcggttatggcacgtcagacaatgtttccgccagggcctattctttccaaagcgcatgggattcaaacggcagttttgtatcaccttcgagctctttaaccacgataagttctaatgagaccgttaccgtttccggaggcatctcctggaaagatggccagtttgtgctggatttgtcagcaaatggtggaacgggaagtatagagttgggtgacagcgtctccattgataaagtgcttctccaactggacggtcccaacaactcttctaccgtgcctgttatttccaatctgtccatgtctgcgtatctggtcccggaaccggcgacggcttccctgagtctgctgggcttggcgggactggccatgcggaggcgtagaaggcaggaagcctgatagaggcgggaaggggagcaaaaaagctgcccatgcgcctctgagtcattattgttcagaaaattgtttgaagaaacccggaagaaaatgattcttccgggttttctttttcctaattattcctcggaaaactctgaatgtggttttaagactactggtcttttcctacatcttccctgttcatgctcctatgggtaatagttgacggttgaaaaagaaaattccgacagctatagtcgtccctaggcaaatgcaattcaaatgattcgttttctatcctttttatttttcctgtgctttttttctgtgtgttctgcaaaagaattgaagatttttttgctgacgggccaatccaattccctgggagcggtgaagggcagccctgccgctccggaattgttaaaaaagtatgagccgaaggaaactctgtactggcacgaaaattttgggcaaaaggaaggcgtgtttcccggcgcttccacatcctgggaacaggtaaggcctgctatgccgcgttataacggcaatttatgcatggggccggaatacgggtttgcctttactctggagaagaatggatggttcaaggatgcggacattgcggtcgtgaaagcttcccgggacggcggcgacaattcccattggcggaaaaacggccaggcttacaggacgctggtgcaagccgtcaagaatgcctgtgcgggtgtggacaggtccaagtattccaaagtggagtttgccgggcttttgtatttgcagggggaaagcaatgccggaacttccattccggagagcgcttcccgctttctggagcttctgggcaatctggcggcagatttgaaaccgtacggggatacgtccgcactggctgcgcaaaaagccgttgttggagagaacgccaattgggccggaaagaatgagtctgatccggaaacgggcaaccttaccggcggtctggatgggcgcgatacggaagttcagggaaagacaacccggcaggtgatgaaggatctggcagaatcccggccttccctgggctatgctcccacccgcgatcttcccaagctgacttcaggggatcagatgggagtgcattacagcggccagtctcagatcagcataggagcccgttttgcttatgaagccgcccggttggccgggaaggatgccggctccgtacgcagcggccgttatgatcttcctctgagttctccggaagcttggatgaaccggaaaatgccggggaagaacgtgtgcgtgtggaacgtggcttcttccgtaaaacccagcctggtgtcgggagtggtgaaattgtttggaattcgtgtggaagatccggccgtcaataccgttattgtccggagtaagggaggctccggagaccgtttggtaatcgggccgggaggcattcgtctggcggaagggaaaaatttgcagttgaggacaaatgtacagctggcgggtcggcaatcctggagtattccgggcggttctgccgtggagattaagcccttgctggttcaggaaaaagccatgcctgtccgtttgtccggccaggcggaggtgcatgtagcccgagcggaagacggcggagaagcggcccgcgtcgtattggaacaggtgttgccctctgccctgaaatgttcctggacgctgtccggaaaggtggaaatgactctgaagggcatggaagggaaggccgtgaatttgggcaaaatcctcgtcaggcagggcgctgtactgaatctgaatggctccagacctgttgcggacagtgtcgttaatcagggcggcacggtgaatccgtaatcaatagacctggtacggtccggaatgcttgccggatttttttagtgaagggaggaggttaaaaaaatacgttttttcctcccggaagggccatgggcttttttcttattcacaggagcggagcggtctggaaaccgaacaggggcatgacctgcggcattttcaccccggtttattcacaggaagttctgcttgggaagcattgatcatcaagtctactgtactatatttggcgtactttttactttatggatgcgttatgtagtagtatggtcgcgccatgagatgcgttcagtgcggtcatttggaagataaggtcatcgactcccgtatgtccaaagacgggacgaccattcgccgccgccgcgtgtgtttgaggtgcgattaccgttatacgacctatgagcagattgaacgcacggagttgcgcgtagtcaaaagggataatctgagagaagccctgaatcgtgaaaagattttacgcggcctggtaaaggcgtgtgaaaaaaggcccgtcagcatggatcgcctggaccgcgccgtggaagagatcatttccgaattgcaccgcgaccatttgcgcgaagtcccttccagcgagattggcaagaaggtgattgaaaaattgtatgccatagatcccgtggcttatatccgctatgtgtccgtgtaccgccagttttccaatgtggaggagtttatccaggagattacgcagatgcgccaccagacgcttattgatcccctgcagcgcaagcttcccattctttaaatttcctgttccatgatcggcttccgaaacaacagaccgttgctcaagcttggtgattgcctgattaccgagtacggggaacaatggctggcggatgctttggagcacgctgcccggcgtgccggaacaacccttccgttcaaggaagacctgctggcttccgtgcgttattatctggagcatgagtgcgatttgtccgtcatgaaggtgtccgagctgtatgcgcgtctgcgccgcatgctcacagaagtgggcctggaacaccttgcaagggagcttagggaggagatgccgcccatgacggtctgcgtcgcggagattgcccgcagcgtgccgttctggctgttttttgcctgcgagctgaaaaagcaagtggaggaattgcgggggcatggcattaccaggtattgcttcacaggcaggaaggaatgcgtgatggctctccggggaaggaagcgctgggaccgttcctgccagtctctgctggaagacctggacttccttctttcccgctatgaggagcaggcggcggattgttaacggaacttatccgtgccgtattggagtatttagctgcgcaattcaacaggttccgctttcccggctgacggagccggttcggagtgcagcgcgtttctgcttttcgtgagcatgcgaggctatttcactttaccgggaacgggcttgcggggcccgttgatccatgctcgggcatcctgttttgccggaaggcccaataagagttaacaggccgtattgtgccgcctgattcccggagatgagccggatgagggaatgcaaggggccttccctcattttccccgaggttgttatttctggctgtttgcagcaggagcagcctcacccgtaccggaaggccgtgaataaggcagagtgaggtcttgctccctgaccgcacgggggaacggccgctgttacaggtgtttgagcgcagggccgttgatgattttgcgggcccggttcagggcggcgtcaatattctcgcagatattgtagcgtttcagctcccggtaaaagggcgcgtggcggatgacgtccagaggctggggctgcacgccgcaaaccagcagagtggaaccgtgttcccggcactggtggcagaagtcggaaaggacgttcaggccggtggcgtccagcgcgggaaccaggcgcatgcgcaggataaccaccttggtatcatgttccagcgtttccagaacctggtccttgaattgctccacggcaccgaagaagaagggacctttcacgtcgaaaacttccacgccttccgggatgtccagcttggcggcagagcggtttccatcatcttcctcatcattttccagcagttcgtttttgatggcggaaacatcgctgatttgggccatgcggcccatgaagagcagggcggccagcaccacgcctacttccacggctacaacgaggtccacaaacacggtcagcaggaaggtgattaccagcaccgccgcatcctgcctgggccctttcagcagacggctgaacgtgtgtatttcactcatgttgtagcacactaccgtcagaatgcccgccaggacagccaggggaatctgctgggcatagtgggcaaaggccatcagaatggccagcagggtcagggcgtgaatcatgccggaaaccgggcttttagctccagccttgatgttagtggcggtgcgggcaatggctccggtggccggaatgccgccaaacagggcggagccgatgttgccgatgccttgtgcaatcagctccatgttgggcttgtggcgccctccggtcatgccgtctgccacggaggcacttaacagggattcgatcgccgccagcagcgcgatggtgaaagcaggggccgtcagcgcccccagggtgctccagtcaatgctgggcagggagggcagggggagcgtattcgggaggctgccgaaggcttgcccgatggttgtcacaggcaacgaaaacgccacggaaacggccgtcatgcccagcatgcccaccagcatggccggtattctgggccagaagcggcggctcagcagggtaatgattacggtgccggcggccagccccagcgccgcccagttgatggtgtggaagtaatggaagtaacacgcccatttttcaatgaactctccgggaattttttccgtgatggtgaggccgaagatgtctttaatttgcgtggaaaagattaccacggcgatgccggaggtgaaccctgtggtgacagggaatggaataaagcggatgagcgcccccatgcggcagaacccaaagatgatgaggaagaggcccgccatcaatgtgcagaccagcagaccggatgcgtggtattgctccaggacgcccatgataatgatcacgaaggctccggtggggccgcctatttgatatttgcttccgctgaacagggaaatgaggaacccggccacaatggcggtgatgaggccctgggttggggagagtccgcatgcgatggcaaaggccatggccagcggaatggctactacaccgacggtcagtcccgcaaaaaggtccgccagaaaggtttgtttggtataagttttgagagaggagagaagagcaggtttgaacatggctgccgggatggttggccggctgcggttgtggccgccgccggcggggttgaagcgtccccttcctgcacccggaggcgccccgcggagacggacggcaggctctcttcgttcccgtccgcctccgcaggcggcgttacttggaaaggatgccttcccagtaggcgatgcggcggcgggtgttgtcggaattgggagcccccgggttggtacgctgggcgaaggcttttgtcaattcaaatacgtcgcgcgcgtctgttccatatgcatttgaaatggaggcgaattgttcatcgctcagcttgttgagcggcgtacccgtggagatgctcatggcgactgccttcccgaccagctcatgggccttccggaaggggaccccgcggcgcaccagataatccgccaagtccgtggccagcagcatgggatcggacgccgcttccctggccctggccgtgttcaccgtcatggcggctatcatttccgcattgacgtccaaggccagtttaaccgtatcaatggaatcgaacaggggttccttgtcttcctggaggtcgcggttgtaagtcaggggaagccctttgacggccaccatgacggcggtgaggttaccgtacagccgccccgtttttccgcgggtgagttccgcgacatccggattttttttctggggcatcagggatgaacctgtcgtatgggcgtcggacaaggaagcgaagccaaattccgccgtgcaccacaggatgacgtcctcgctcatgcgggagagatgggctccgactacggccaggtcaaaaagtatttccatgatgtaatcccggtcggcaattgcatccatggagttttctgtaactgcgtcaaaacccagttccacggcaattccgtggcggtccaggcagatggtggaaccggcgatggctccggaaccgagcggggagacgttcaggcgcctgcggcagtccttgaggcggtccgcatcccggtccagcatttccacgtaagccagcaggtgatggcccatggtgacgggctgggcgcgctgcaggtgagtatagcccggcatcatggcatctgcgtattccttcgccttcatgaccagcgcgcgctgcagatggcgcacttttcccaaaatttcatcgatttccgcccggcagtaaagccgcgtgtccgtagctacctggtcattgcgggagcgtgcggtatgcagcttggcgcccggagcgccgatgcgccgggtgagttcgctttcaatgttcatgtgcacgtcctccagttcccggctccacgagaagttgcctgcttcaatgtctttcaggatgtctttcaggccggattcaatggcgttgaattcttcctgcgaaagcaggccagccttgagctgggcccgcgcatgggcgatggatccggcaatgtcctggcggaaaagcctccagtcgtaggagacggattcgccgtagcgttgaaccagatcagcggtgggtttagaaaatctgcctttccacatgacccacatgttgtgccccaggagcttccgttttgaaagcctgaaatgggtaatggaggcagattccgcggaactgggaaaaatccgcatgcctggaaaaccggagtggagccggaaaagagagaaacggagcatggctgtcttttccctgtggcggatgggggcggatatgttattacgatgccgtgcgtatggatgacgaaatgcctctgaaacgggaagatttgcggaaacgcgcggaggaaaaggcggcgaaactggctgcggaggggatggaactgcgccccgtaacggtttccgggcgtaccctggcgaaaaggttctgggggaaggaatggatgaagagtctgtccgcgtgcgaggtgtacgggatgcggctggcccccggccggacctacctgcgctatggctgtgttctggaccttaaaacggttcccggccgcatcgatgctctggtgatgggtgaacatttgtatgaggtttgcatccaggcctcccccccggatgaagaggtgcttgcccggctgcgcgcacgatgcgccgggcagattggttcctggattgatctgctgaaagggaatttgtctcccgagctgctggaaatcctgtgcgctccggaaggcggcctgtttcccgcgccggaagagtggcgtttttcctgttcctgtccggattgggcggatttgtgcaagcatgcggccgcagtcctgtacgctttcggcgtgatgctggataagcagccggagttgttgttcaccctgcgcggaatggattcctccgttttgattccgaaagctccggaacccgttcccggaggagaagacgcactggatgtggatgccggttccctttcggatatattcggcatcagcctggattgattattgttgccgtgattgtggttttattccggttttgaatagccaggagggaaggggatggccgtcctttttcatgaactggcggcggatgagggtgcccgggcagtcaggcgtgccgccggccgtttgccaatgtttccgcatgatgctcgcccgggtggagaatgtttccgctttttccatgatgcattgcaggttcgggagggcggaaaaaacgagataaagaatcaggagggcccggtatttcacgtctccccggcggagggcccggagaaagagcagggaaaggaagggatagaggacggccggagctttaaagagaagttcattgttcatgatgcccgtgcggaaaaagaggctgcctgccatcatgcccagcgtgatgtagtacaacgggtttttccggcattttgggaagaggagcgcccccggcagcagtatccccagggccagggccagcaggaagctggcgtatttgacggaatcgggatggagcagaagccgctgttgcccgtaatggtaaatttccgcatattttgcatcaaacaggcaggagaattgccctcctccgtccaaatgggaataaaagacggccatgacggccgtgcacagggccgcgagccagaaaaccggctggcccagaagggaacggagacgggaaagcggtttccgtgccgccgggaggcggaacagggtttcatacgccatatacggaaggagcagaagggcgcccagcggggaggacggcagcagaagagttcccgcgagataatacccggagggaggcagggagcgcgtcaggacgaatacggcgcacaatagcgccggaacggcgtgattgaatgtgttgaagagttggacgggcatgccgatgaacaggaccatctgggcatggtattccgcaaacagggaggagaggggaattcccaggcagtccggcaccgctgccggagagccgaggcagaggagtatcagtgcccagcgggccgtcttccggattccccagcggacggttgccgccagcagcgccagttccagcccaagaaaggtccacagggccagtagccagggagcccatgatgccgggcagaaagaagccgccagagccggaggcagccaatggcccaggtagtagatgaaatgatgtccgtcctccgtgacgaggggccaggaatttgctgcaaggcgttcataaacggcattgcggatgataaaatccgcatgttgctggcagtggcccgtgaatccgcacaacagcaccagcatcaggcagaagaaggagaggagacccagcgcggccaatctgcgcccgcttaacggaagcctttgtgccggaagatgccgggcgcagacgtacagcccgcatgccagtgcggcgcaaagcggcgcggaaaaggccggatgcacccatccctgcagaaaaaggaggaggggcaacgccagatacaacagtcccgcgcatagcggaaggcgtgcggacaggaagaagcgggcagacatggcgcggaacgggaaacttatcggcaggggaggactccgaagggtcagcatggcatattttgttccaaagaaaaggatgcagtttcctccggagaatgaaaaagccccgcaccgcctagcggcggccgggggttggcgttgcttgataccagttccagcaaaaaggtcagaacaggccgaatccgttgccgtagcgggcggattctcccagttcttcttcaatccggagaaggcggttatatttggccatacggtcggaacggctcaaagagccggttttgatttgtccggcgttggttcctacggcaatgtccgcgatggtggcgtcctccgtttctccggaacggtgggaaataacggcggtatagcggttgcccatggccagctccacggcgtccagcgtttccgtcagcgagccgatttgattgaccttcaccaggatggagttccccacgcccagatggatgccttttctgaggaattccacgttggtgacaaagaggtcatctccgacaagctgagtgcttttgccaagtttttccgtcagggttttccatccgtcccagtcgttttccgcacagccgtcttcaatggagacgatgggatattttttcttcagttccacatagtagtccgtcagctctgcggcggttctgcggctgccgtcggatttcttgaaaatatacagcccggattccggttcataaaattcggaggaagccacgtccagagcaatggaaatgtcctccccgaaccggtaaccggccttgtccaccgcctgggcgatgcaatccagggcgtcttccgcagagttcagcctaggggcgaagccaccttcgtcgcccacggcggtggaaaggccgcggtcatgaagaacggatttcagcgcatggaaaacttccgcgccataacgcagggcttcccggaaggtgggagcgccggacgggacgatcatgaattcctggaaatcaataggcgcgtcggagtgggcgcctccgttgatgatgttcatcatcggaacgggaaggatcttggcgttcgggccgcccaggtagcggtacaggggctggtgcagctgggccgccgccgccttggcaagcgccagggaaacacccagaatggcgttggctcccagtttggccttgttgaatgtgccgtccagggaattcatgagggcatccgccgtggtttgttccgtggcttccagaccgatcagggccggagcaatgacgttacggatgttgtctacggccttggtgactcccttgccctggtagcgggttgtgtcgccgtccctgagttcccaggcttcatgttccccggtggaagctccgctggggacgcccgccgtgcctacggcgcctccttccagataaacgtccgcctcaatggtggggttgccgcgtgaatccagaatttcacgccctgttattttcgcgatgcgcatttctttcataaaaatcggatggttttttccttggaaaccagatattggaattagtttaaactaatttacaaggtttgtgtatcccgtatccggagcggatgcaagctttttctccgggagaaagaccggagttcaatcagtacggaaaccccttggcggcggttcagttgcggtaatgttccttcagccacgttatttcttcgccgtgcccggcatcgtctctgggcgtttccaggaaaaagggcaattcccgcagaacgggatggttgatgatgttgatgaaggcctgttctcccagggaacccttgccgatggtttcatggcggtccttgaaggaggagaagggcgtcatgctgtcattcaggtggatggcgcgcaggcattccaggcccagcacggcatcaaaatgttccagtacggaatccagcctgttgacgatatcatatccggcggaatagacatggcaggtatccaggcatacgccaagtttgtccttcaggtccacccgctccatgatggcggccagttcttcaaaggtccggccgacttcgcttcccttgccggacatggtttccagcaaaacaatggttttttgttccggtgaaagcacgccgtttaactggttcgccaccagttcaatgcctttttccgctccctgccctacgtggcagccgggatggaagttataaagatttcccggcagatgttccatgagttccagatcctctttcagcacctgggccgcaaaacgggcgacgccggggtctgcggaacaggggttcagcgtgtagggagcgtgtgccagcagcgtgccgaacccgttgttccgcgctaattccagaaaacgggcaatatcctgttcgtcaatagttttggctttgctcccacgcggattgcgggtgaagaactgaaaagtattggcgccgatggagagggcaacccggcccatggcttcatagccttttgcggaggagaggtggcatccgatgtatggcatggcggtaagttcggaatggaaaggaagtttatcaatgccgcggagaggaagagagactaaaaggcctgcatgacttgatcggaaagaataagaccgtcagaaacgtacgatgagttaaaacgatagtgattgttggtaatgaatttaaaccagttgattacggcggctgtattgggaggagctctgtgcgcgacctgttttgcagaggccaggccagaggatgttttaacgccgttgacgcctgttccttccgcggcgcagcttgaatggcatgacatggagatgtacgcctttatccattttacaattaatacttttactggaaaagagtggggctatggagacgaaaagccggagctgtttcatccttccgatttcaatgcggacgaccttgtcaggacgctggcggacgccgggttcaaaggggtggtgctgacctgcaagcaccatgacggtttctgcctgtggcctacaaaaaccacccggcatagcgtggcggcctccccgtggaagcaggggaagggggatgtggtgaaggaggtgtcccgcgcgtgcggagagtatggcgtcaggttcggtgtttatctgtctccgtgggaccgcaatgccgcctcttacggcacgccggattatatccggatgtaccgtcggcagttgaaagagctggcggcgggatacggtcccattttcctggcttggtttgacggagcgaacggaggggacgggtattacggaggagcgcgggaaaaacgttctatcgaccatagcacgtattacgactggaagacaacttggggagagttgaagaaacggcagcccggagccgtcatcttttccgacgtagggccggatgcccgctgggtaggcaatgaaagcggctatgcgggttatccctgctgggccacatacacccctgttccgctgcaagccgggacggaacccgcgcccggcgccgtgcgctaccggctgggcacggaaggcaccatggacggcaagtactggattcccgcggaggtggatgtttccatccgcccgggctggttctggcatgagcatgaaaattcccgcgtccggacgccggaaaatctgttgaagttgtattttgacagcgtaggcagaggggccaacctgaatttgaacgtgccgccggaccgccgcggccgcattcatgaagaggataaaaagtctctggcgggcttccgtgtgttgctgtatgagttgtattcccgcaacttcgcctccggggcacaggttgagtcctcctcttcccggaaagggcacggtgcggaacaggttctggaccggaaacggacgacgtactgggtggccgctccggaagataagcatccctgcgtggtattgaaattgccgaagcccgcggcgtttgacgtcatccggctggcagagcccatccaactggggcagagagtgcgcaaattccgtgtggaggtgcgtgagaacggccagtggagcaggtggacggagggagtcagcataggggccagagttcttctgaaaggaaggcccgtgacggcggatggagtgcgcgtggtgctggaacaatccagggccgttccggccctgtgcgaggtttctttgtggaagtatcccgtcatcctgaatgctccggcggtgagttatgaccgcaatggacgggtgaccctggcttccgcggagaacgtggtgattaggtacaccacggatggaacggagcctggtccgcagtccgccgtgtacaggaatcctttccttctccctgccggggggacggtaaaagcggcggccgaatatcgcggcagaaaatcttccgtgaccactcagctcattcctgttcccacgcgggactggaaagtggtgtccggggaaagaagcgccgccgctccggaactggccattgacggagattcttccaccctctggcatacgcatgccgcccagggagagctggctcccccgcaggcgctggagattgacatggggcgtccggttaacgttgcctccgttatttacacgccgcgcagggattcggcaacgggaacgattgaccgttatgccgtctatttgagcgcggatggaaacacatggggcgctcccgctgcggagggggagttctctaatatccgcgccaatcccgttccgcagcggattgacctgaaagcgcctgtcaaagcgcgttatctgcgttttgtaggcaagcgggtggtggaaggcagccatgttgccgttgccgagctgggagtattggaaaaataaacggtttcctttttttattatcgtaatcctccggcgttttcttgacggatggagggaagaggggcaagatggcacgcatggaacaagtcagcctcatggagttgggcaagctggccgcggaaggccaggttgaagcggaagtttttgcccagatcgcccagtgcgcgcagaagatgaccaagggcaacaaaccgtatctggatgtgtcttttgccgatgcggaagggaccatgggattgaaggtgtgggaggataaaccctggttccggacgcttgcttccctgcccctccgcagtttcgtgagcctgcgcggccaatgggccaagggagggttcggcatggaggtttccgacctggacgtgcggttgctggacgaacaggaaaaggaaagctttctggccggttccggaaccttgaagaaaaagcaggaagctgatctgaaggaaatttgcgtgctcatcaagggcatgaatgatccgcgcatacgcgccctgtgcattgaattcattgagcagttcggggaacgcctccagcgcgccgccgccgcccgcacctaccatcacgcccgccgcggcggactggtggaacacgtggcggggatgatgcgcacggcctctgccgtctgccaggcgaatccggggctgaaccgtgaccttttgctggccgggtgcctgttccacgactgcgggaagttgtgggaaaactgctacccgaaggaggattttacgatgccctattcggaggccggagaactgctgggccatattccgctgggcattgaactggtcaacaatttgtggaagcgcatcatgtcccttccggaggcggattcctggaaaacgctggaccctccttcaccggacgtgcgcatgcacctgctgcacctgattgcgtcccatcacggggaacttgccttcggctcccccgtgtttcccaagacgccggaggcggtggccctgcattacatcgacaatctggacgccaagctggaaatgttccgcggagcttatgagacgggcgaggccctggctcccagagtgttccagcgcaaggcccctctgcctgccaacgttgttcttccgctgccttccgtcctcccgctggagccggacggcgaagacgctctgccgtaaggttccccctgcatggaagaggttcggcgtgttcttcgtccgtggccggaacggatgacggcatctgctcccttgctgattccggctttgtccctgctgtgcgcttgcgcggccatggatgtttccctttggttctggcttccatgtttctgcctggcggcgttgccgtgttttttacatgcgccctccatggggttgcttgccgctgccctggcgatgtgggctgccatttatcttttcgcatatgaacgggaatacgcaggcgttcccgtggaagcggggagagccatggtgatggaaggctccattgaggctgtttccggaaaatccgtattgtttcgtccggatggttcccagtggctgtacgcggtttcctcccgtgacggggcctgccctctggaggcgggggaacgctaccggattaaaggagaggcgtatccgcttcaggcgccgtgtggtcccggcatctttgaccgggagcggtggggttacctgcacggcatcatcgccggaatccggctggatgagtactgccggaacgggccgggagactggcgcagccgtttccgggctttttccctgcggctccgggaaagggccgcctccctgctcagggagggcgcccctccggatgatgaggcccggcaggtgatggtttccgccgtgcttggggacaagacggacgcgaggccggaaacgatggcgaagtttctggaaagcggctgcatgcatgtattcgccgtcagcggcatgcatgtgggcgtggccgccatgctggttctgggtatgctgaggctcctgcatgtgcgtccccgtgcggcccggctgtcctgcatcctgttgctggcggcgtacgtgttcgtgaccgggatgtccgcttccgccctgcgggcgttcatcatggcgtcagtctggcttctggcgttcgtgctgcgcagaaaggggcatccggccaatattctggcgctcgctttcatccttctctgcttgatgaatccgctccaggttttccagccggggttccagctttctttctgcgtttttgccgccattgcctgcctggcgggatggctcagccgggaaaagcccctgtggtcgccggacccgttcattcctccccggatttaccatgcgcgggaaagattcctggtgcggctggaaaaagcaggccgcggcgcgctgattgtctccgtgggggcgtggctggcctccattcccctgacggcatggcacttcggaacctggaacctgtatgctcccttgaccaatttgtgcctgagcgtgcttgtctttcccctgatgggcgtttccctgtccgggctggtgttcgcgtggtgcccgtggatgctgcatgtttgcaatacggctgcttcctggttggcgtccgccatgttggccgtagccgggggagtggcttccctgccgtacagttatctttcttccgcaccgccttccggggaaaatgaagcggtgatcgttcccctgcagaaggacgcctggtccgcactcatttccaatcccgcattggttgtgggaagcggagcggaagatgcggtgcggtacaccctccttcccgtgctgaaggcgcgcagtatccggccctgcggcatgctgtgctgcgggaacggcaaggcggaacgggccggggagaaagaactggagaaggaatatcccggaatccggaactggggcgcggagtccggggaatgtcccgtccggcaatggaggttacggccgggcaatgaacttgtgctggaagattttcctgtaccgttgcgcacgggaatccgtcaggaccggagccgggtgttgtcatgggaatgccgcgggaggcggttcctgatgatagggaatgccgggttttcctccctggcgcgcgcggaaaaaacaccgcgggcggatgtattgctcatcgggcatcatccgcgcgacccggtggacagcgctgcgtggatcagggctacaggcgcccgcgcagtcattttcgcgacggagcatgaatgccccgtgccggagggaacagccgtgtaccgtctctgggaaaccggaaccctctatctgcggatggaggaaaagggcgtgcgaatcatcccctggaggggcatggaacgccgtacagggtgaatcccgtgctttcctcaatgcggatgggaaggatctctcccgccaggtcaggggcggcatccaccatgacgggcttgttctgggaggttcggccggagaggcgcgccgcattcgttttggacggcccttccagaagaacttcctgcacggtgcctaccagatcccggtttttccggatggctatttcattgactacggccagaaggtcctggttgcgcgcttccttcacttcctccggaatctgattctccataacagcggcgggcgtgccgcggcgcggggaatagcggaaaatgaacgcgttgtcaaactgaacctgttccacggcctgcctggtcagcaggtaatcctcctccgtttctcccgggaagcccacgatgatatccgtggtgatggataaatccgggcgtgcctgcttcatccgggagcaaaggtccagataggtttcattcctgtacggcctgcgcatcattttcaggatgcggtcgctgccgctctgcatcgggaaatgaatatggctgcacaacttgggaagataggtgaacgcctgcaccagatcctggcggaaaccgatgggatgcggggagacgaagcggatgcgccggaggccttccacttcatgcacggcttccagcagctggacgaagccgcccttgccgtctgccgtttccatctgcctgccgtaccggttgacaatctggcccagcagcgtgatttccttcacgccggagtccgccagcatctttacttcatccaccacgtcccggatggggcggctgcgttctgcgccgcgggtgtaggggacgatgcagtaggcgcacttcatttcgcacccctgcatgatggagacatacgccgtggagcgcgctccgggattcaggtggtcccggatgcggttctgggagtccgcctcttccgccacatcgcacacatgcgtgccggaaaaggcggtttgcaactcgtccatgcggcgttcctggcgcgcgcgcagaatgccgtccacgtgttcaaacacgcggtggtatttctgggtgccgaccacgaggtccaggcgcggcagttccttgaacagctcctcttttttactttgggccatgcagcccatcatgccgtacactacatgcggacggtgccgctgctgcttggccagaagccccattttccccagcgccttttgttccgcctgctcccggatggagcaggaattgaacaggatgacgtccgcctcatcctcgcagtccgtcatggtgtagcccttctgcacgaacatgcgggccacctgctcggagtcccgttcgttcatctggcagccgtaagttttgatgtaaagcttgggcatggaaaaaatcaggtattttttttcagggtgaccacgcattccagatgcttggtctgggggaacaggtcaaagggctggacggcggtggcggaatacccggccttgtcgaattccgccaaatcccgtatctgggtggctgggttgcaggaaacataaacgacctttccggggccgaaggcgaacaactgggtcaggaattccatgctgcaccctttccggggcgggtcgatcaccacggcggttttttccgcggggaaatccacccgggcgaaaatggccccggcgtccgccgccaggaattccgcgtgttcgattccgttgctgcgcgcgttgctgcgcgcccagtccgcggaagtctcactgacttccacgcccagcacttttttaaatttcttcgccaggctcagggcgaacaggccggaaccgcagtaagcgtccaccaggaattcctccccgtccatactcgcctgttgggccacgtaatccgtaaaaagcggaagaatgaaaggattattctgaaaaaagtcccccgccagaaaatggaactccaaatcgcccacccgttcgcacgccacggcgttgttattggtgatgacggttccttccgaagcccggagcagaatggtggctccccgcttgaaccgggccgcggcctggtaaacgcttttgcgggccaggggcagggcttcattgatgcactccatggcaatcgggcattgcggcacgtccaccacatcccttctggagcctgctttcagaaaaccgatggccggcttgcctccttccttcggcttgtcaaagtggggcgtaatcttggagcggtaatggtattggcggggagaggctatggccggattgacgggcagttccagccctgcctgcaggcggagcagatccgctacctgccgggttttccagagaagctggcggtcataggagagatgctggtactggcatccaccgcaggttccgaacaggcggcattccggctctacgcggtccgggctggggttaattatttccaccagatcggcggaggaatagtttttatcattacgccagacgcgggctttgacacggtctcccggcagggcgaaggggacgaaaaccacccatccgtccacgcggccgatgccgtctcccgcattggaaagagcgtcaatatccagttcaagctcctggtggtaggaaaaaggttcggggtggaagcctttgggaatggtcgcagtcatggtggtgggaaaagattatggggcggaaggggtaatcagtttgccgtccagatcgtacagcagggtttccggcagccggggggtgcgcagtccggggcggaaatcgcccggcaagacagccggccccggagcggactcttcattctcatcctctggaagaatctcctgttgcgccggagcgggagcccagggtgcgggatggtccgccggggcggtttgttccggctgaacggctggaaccggggcgggggcctgaggcgccgtttccttgttggaggcgcaggaataggtccaggtcagcccggcaatcagacaggagcggatcaggagctttctcatggcgcggattcttacagcttcattcggacttggcaagtgaatagccctgctatggttcatgtaaagggcatttcttttttcccggaaaccgggaaacgcttgctgtttgactatcccgggatagtatctatagtaggaacacgtatgaggcctttcctttttttatgttgttccgctgtggtttcagggctggttgcccctcaggccggcatagctcaacagcgtcctcccattttcgggtttgccaataaaaacaggatacctgaagtcaataaatcgggcagccccgtttttgacaaactccgtaatgaagctatgaagaaaaagctgccgctggtgatttacctgaccggttcttcatggtgttcccggtgtaatatttttacccgggaatatattaaaaaaacaaatttcaaaaatgccgccgggaagaaatttatattctggctggtggacaccaaacaggtgccgggcaattccccgggaacgtttaaattcaagatggttccggaagaagccgcaaaaatcgtggggtgtgcggattccccccgtgcgccgtatgtggttcttggccctcccgccgtgtttatcattgaccctgtttccggagaattgatcaagagcctgttcaccaaaagtgaagtggacaagtatggaaagcctcttgccggaattattgaagaagcctggaataatcatgtaaaccggaagaagctgaattgaaatgcttaatggcaaggtatccgcgaagccaaataatgacggcggcaaaagcggaatgatgaagcggaacggttttaaacggttatccgttggaaagtgatttttgacgcgtagcgccgggaatggcagcttgtggtttctgttggtttatcaagtcctgacgtgttgatattttaactttgcaatatgaattaagaataattttaattaatatgaccagtataaagcaaagagacgaattgcaatctactatttggaaaatcgccaacgaagtgcgtggcgccgttgacggctgggattttaagcagtttgtcttaggagctcttttttatcggtttatcagtgagaacttcaccaacttcattgaaggcggtgacgagagcgtcaactatgcgaatatgtcggatgacgttatcacccctgagataaaagatgacgccaccaggacaaaagggtatttcatctatcctgctcagctctttgtgaatatagcaaagaatgccaacaacaatcctaatctgaacacggacttggccgctattttcgatgcgatagagagttctgccaatgggtatccgtccgaacacgacataaagggactgtttgccgactttgacaccacaagcaaccgtttgggcaacaccgtggaggagaaaaacaggcgtttggcggcagtcatcaaaggtgtggaaagtctggatttcggtaattttgaggataatgagatagatcttttcggagatgcctacgagtttctgatttccaattatgctgccaatgccggcaaatccggcggagagttctttacgcctcagaatgtatcgaagttgatagcgcaattagctatgtcgggattgacttccgtcaacaagatttatgatccggcttgcggttcgggttcgttgctgcttcaagcgaagaaacagtttgatgcgcatctcattgaagatggctttttcgggcaggaaatcaaccacaccacttacaacctggcgcggatgaatatgttcttgcataatatcaattatgacaagttcgacatagcgttgggcaatacgctgatcaatccccaatatggcgatgaaaaaccatttgacgccatcgtctcaaatccgccatactccgtcaattgggtgggaagcgacgacccaacgctgatcaatgacgaccgctttgccccggcaggggtgttagcgccaaagtcaaaagctgactttgcttttgtgcttcacgccctcagctatctttccgccagagggagggctgccattgtctgtttccccggcatcttctaccgtggcggtgcggaacagaagataagaaaatatcttgtggacggcaactttgtggaaacggtcattgcattgcctcccaatctcttctatggaacgggcatctccgtgaatatcctcgtgctgtccaggcacaaggctgatacgaagacgcagtttattgacgccagcggagaagatttctttaaaaagcagaccaataacaatgtcctgacagatgagcacatagaaagaatagtcgatatattcgccagaaaggaaccggtggaatatgttgcggcattagtagataacagcaagattgcggagaatggctataatctctctgtgagttcatatgtagaggcgaaagatacgcgcgaggtgattgatattgccaggctgaatgccgaggtgaagcaaaccgtggagaggatagatgcgctgcgtgcggatattgacgcgattattaaggagttggaggatgaataatgcaccagcgataacaggaacggcttttctgaccgatgtagtcaagcagatgttaaagggagttgacataaaatgagtagactagacgagcttattcaagaactatgccctaatggagtggagtataaaacggtatcttctataagtaagaatataacatctggcggtacacccaaaacaggagttgcagaatattataatggcgatataccgtggttaagaactcaagaagttaattttgatgatataacagacactggtgtaaagattacacaattaggagttgataactcatcagctaaatggattccagaaaattgtgttattgttgcaatgtatggagcaactgttggaaaagtagcgataaataaaattcctatgacaaccaaccaagcttgttgtaatattgagcttgataaagaaaaagcattatatagatatgttttccattgtctatgcaaccaatatcaatatattaagtcattaggacaaggtagccaaacaaatataaatgctcaaattgtaaaaaaacttactatccctgtgccacctcttgaggtgcagagtgaaattgtccgtattctggacaatttcaccgagcttacagcggagcttacagcggagcttacagcggagcttacagcgagaaagaaacagtatgaatattatcgcaataaattgttgtctttcaatgaattgataaaatctggggggtgtcaacttaaaaagctgagagaaattgcagaatattcacataagagaataaatgcgatagctatgaagaaagataattatgtcggcgttgataatcttttgccaaataaagctggcaaagtaggatcaaattacgttcccactaaagggaatttaactgcctatgttataggtgacgtactaataggcaatattcgtccttatttaaagaagatatggttggcctataatgaaggtggtgcaagtggagatgtcttggtaattcatttaacagaccaatcagtggatgttaaatatctataccaggtattagcggacgataaattctttaactacaatatgcaatttgccaaaggagcaaaaatgcctcgtggcagcaagcagaaaataatggattatataatccctgttccttcgctcgaagagcaacgccgtattgtctccattctcgacaagttcgatatgctgacaacctccatcagtgaaggcttgccaaaggaaatagaactgcgtagaaaacagtatgaatattaccgtaaccaattattatcatttcccgataataaaacaacagcctgaatatgggaaaaacattgacagaaatagctcaggagctaaaaaacagtccaaagaaggtccagcttatctatgcctttaacggtgtgggaaagacgcggctgtctcgcgcattcaaagaattggtgtcgcccaagcatgaggaagaagaagcgcaagacggggatactggcgtaaaagtattgtattataatgcttttactgaggatttgttctattgggataatgatttggaaaaagatacagacaggaagctggtgatacgtcctaatgcctttactgactgggtgcttgaagatgaaggacaagacagaaatattataactaatttccagcattatactaatgataaactgactccatatttcaatgaaggttataatgaggtttccttttctatagaaggcggcaacgaagagcgaattgataatatcaagatatcgagaggcgaagagagttgttttatttggtgcgtgttttacagtctgctgaaagaggtagtcgaagtactgaatgttccagagccggaaaaccgttcgacaaataagtttgatgatttggaatactttttcatagacgaccctgtaagttcgttagatgacaatcacttgattgaattggcggtagacgtagcggaattgataaaatcaagtcagtcaaatttgaagtttattattacaacacacaatccgcttttctataatgtactatttaatgcatttaacaatgcggattcgcgttatagctacagcccaaggcatagtgtaaaaaaacgcttggaaaaattggatgatggcacttttttacccatagataccaacgattctcctttttcctatcatttagctctcttaactgagctgaataaagccatcctctcagatgatattcaaaaatatcattataattttcttcgtaatatattagaaaaaactgctacatttcttggttatggaaattggggagaacttttgcctgccgaatcgcgtgaggcatattgcaggcgaatcaatctgtatagccattctaaacatagtggagaggaatcttcaattgttaaagaagaggataaaagagtattaacttatttagtaaaagaggttctaatacctcaatatcacttccactcaatcgttgaccataaatagtgaacgacatgacacagtacagtaccattgcagaattgcaaaattttatcgttctcgacaactacaccaagagttccatggtaagcgagccgcctgcaggttatcagacagaggctgctttggaacgcgaatttatagaagatttgatatcacaaggttacgaatatgttcccagccttgttacgcctgacgccctgctctgcaatgcgagaaaccagttgcaggcattcaacaatatcgtttttaccgattctgaatggggtcgctttctggaggaatatctggacaagaagagcgacagccctgttgaaaaaacaaaaaaaatacacgatgattacatctgtgactttgtgtttgatgatgggcatattgagaatatatacttggcagacaagacgaatattgcccgcaacaaagtgcaggtgattaatcagtttgagcagttcggggaacaagcgaaccgttacgatgtcacgatactggtaaatgggttgcctatggtgcaggtagagctgaaaaagcggggtgtggctatccgcgaggcttttaaccaggtgcgtcgctacagcaaagagagcttcaacagcgaaagttcactttataaatatttacaggttttcgtcatctccaatggtacggacacccgttattttgccaataccgtaaagcgcgataaaaacagttttgactttacgatgaactgggcgaagtcggacaatatgttgattaaagacttaaaggattttacggcgacatttttccagaaaaatacgctgctgcaggttcttttcacatattcggtgtttgataccagtaacacgctgcttattatgcgaccctaccagattgcggcaacggaacgcatcttgtggaagataaaaagctcttatcaggctaagaaatggagcaatccggagggaggcggatacatctggcacaccacggggtctggcaaaactctgacgagttttaaggccgcacagcttgccacacaacttgattttatcgacaaggtgttctttgttgttgaccgcaaggatttggactatcagacgatgaaagaatatcaacgtttttcgcccgatagcgtcaatgggtcagagagcacgtcgggactgaagaggaacatagagaagaatgacgacaagattatcgttacgaccattcagaagctgaacaacctcatgaagagcgaaagcgacttgcccgtttatcaaaaacaggttgtatttatcttcgatgagtgccaccgttcccaattcggagaagcgcagaagaatctgaaaaagaggttcaagagatattaccaatttggctttacggggacccctatctttcctgagaatgctttgggggcggagactacggccagtgtgttcggccgtgagctgcattcgtatgtcatcacagacgccatacgtgatgaaaaggttttgaagttcaaagtggactacaacgatgttcgtccacggttcaagaatttggaaactgaaaaagatgaaatcaagttaaatgcggcagaaaatcaaaagcttttgcttcatccggaccggatcaaagggatttctcaatacatcttgcggaatttcaggataaaaacacatagaacgcaagggaatgacaagggctttaatgccatgttcgcagtaaacagcgttgaggctgccaaactgtattatcaggaattgaacaatctgcagaaagaaagtgacaggcccctgagaattgccaccatattttctttcgccccaaatgaagaacaaagcgctaagggcgatatcaaagatgaaaattttgacccttcggcaatggacagcagcgccaaagagtttttggcaaaagcgattggcgattacaacgtgatgtttaaaacgaacttcggagtggatagtaaagagttccaaaactattatcgcgatttggccaaaagagtaaaaaaccgggaagttgacttgctcattgtggtcggtatgttccttaccggttttgatgctcctgctttgaacacgctgtttgtagacaagaatctgcgttatcacggtctgatgcaggcgttttcacgtaccaatcgcatctatgacgcaaccaaaactttcggcaatatcgtcacattcagggatttggaacaatctacaatagatgcgatcactctgtttggagataagaacacaaggaacgtagtgcttgaaaagagctacaaggaataccttgaaggatttaaggatattgccaccggcgaggcgagaaaagggtatgtggaagttgtcatggaactgaaagaaaaattccctgccccggatgagatagtgacggaagcagataaaaaatcctttgttaagctgttcggagaatatctacggatagaaaatattttacaaaactacgatgagtttacgcagctcaaagccctgcaaaaaatagacaaagagaatcgtgcggctcttgaagcgtttaagaatgccaacttcttgactgatgaagatattgcagccatgcagggcattgatgtactgaaagagcgaaccgtacaggattatcgttcgatatacaatgatatccgagactggttcagacatgagaggaacggtaaagctccggaagattcaaaaatagactgggatgatgtggtttttgaaattgatctgcttaaatctcaggaaatagatctcgactatattctcggactgattttcgaacacaacaggaaaacgaaggacaaacctgccttggtagatgaggtgcgccgtgttatcagagcgagcatcgggaacagggcaaaagagagcctcattgttgattttatcaatgaaacggatttggaaccgattcgagataaggctgatattattgccgctttctttacttatgcccaagagaaacagaaaaaggaagctgctgctctgattacggaagagaaactgaacgaggaagctgcaaagcgatatattcaaacatctttgaaacggaagtacgccagcgagaacggcgctgacctcaatgctattctgccgaagatgagtccgttaaatcctcaatatctgacgaagaaacagagcgtctttcaaaaaatcgtcgctttcattgaaaagtttagggatatcggaggtcaaatttaatacctgcacacgggcaagctgcccgattttgccgccctcatccggcatcatgaggtattactcttctaaaaacggtaaatgaagcgcagccatggctggggagtgccggaatagtagggataccaccggtgtccgggatggtgcatagtgcggccccattcatcctgacggcgcgcctggggcgcatagaaaagctgtttccattcccggctggcgaaggaagaaggctctgtttccgaagccggaggcgccagaaccgcctggagggcgctggaagaacagcaataatagggaatgttgaaccggggcgccattccaaacgccaggagaagccatatccagacgcggagaccgggatgccgcgtccaggaggaagccagaaaggcaagcaggcaggccatgaccggaacgcttcctttgcaaagcaggtcattgacgtctccgttcacgtaaaagaaaggcagaatcaggccggttgccagcgtacagatgaagaggggattcttgcggaaatcccgccagcagaacagggcgtacagcaggaatgaggttgccataagcaggaaatcccccggacgcgtataaaaaggccgcacgcccatgtgggaggatggcgcgtttaccgccccataataaagaagaaaacacgttcccagcagaacggcggctgaaaaggaggggtggagcaggacatcccggagagggaggacgcctttccattggcggcgccactggcaggccgccaggggcagccctccaagggctgcgaggggggaataaaaggccgtggctgcgaacagaataggcatccagtataggggcatgcgtcctgaagccaggaagatgaaaaagagcagaacaggaatggatgcgtttgcgctgcacatgatttgttccgccgtgccgaagtaatgcagacgaaacagatccagccccagccagcactggacattcagcagagagccgaatgccgccatcagcagggcgagcagcagggagcggcgtccggagaaaacgcagagccacagccaggaaaggaacaggccccaggttccccacagaacgacaagcacgcgcgcggcgtccagccctgccagttttcccgccagggctggaaccagccagaaccccgtgttgtaaatcagcacgttcccgtccggaaagatgacaggccacggactggcgaccaattcacgcagacaggcatttctgacgatatggtcagggtgctggttgacccactccccccagccggaaagcgccatcagggcggcaaacgccgccagggcgagaaatgaagagcgggtgaacagggggaaggcggggagagaatcccttgtttgcggttccttgctttctcggggcgtcagtcccgccgccgtcaggagcgtgagagggagagcggcgtaccagtgcatccacccggtcaggaacaccaggacaggcagcagaagccaggcgcaggtgtgccacttcagcgcggttgcgttgaacgcttgttccgggcacggggcatcagcggcagggggaggcatttccccggaaccttaatggggctggtccgcgggggcaaggaggaaactcgcagaccggaacggaagggggcatttgtatgggtatggtggcaggaatgagcgcgcgccgttgcctctttaccggagaaacggggcaggtcatgctgggaggcctatgaataaaacacaatttatcagggagctccagcgtgagctggggaaggacgttacttcccggcaggcggaacacgcgttgaacgcggtgctggatacgattgcgcggtcggtccggaggcggtcgctggtgaaattccggggttttggcactttccgcgtcaagcaccgccgcgcccgcatcgtacgccatccggaaaacggcggcaggttgctggtgcatgaatcgaaaaccatgaaattccacccctcttcccttctgtggaaggagtagggaagccgttcggcagctcctgtcattttgccattgacttcctcgtccgcggaggcccttaatgtggataaggcaggaacatttttgcctgcctgcataagtaactggccccttccacgtttgccgattatgactccggattccgttcatttgctgacccgttcctcccagatgaccctgtgcaaagatgaacagggccgtgtgcgccgcgcctattacggcccgaggctgcatcagccggaggatgccctggaaaacgccgcggatgctcctctcctgtattcctccctggcggattccgtaacagggcttcccaatgcgtccggcgagtactgcatttgcgtgacccaggcggacggggccctttccctgagcctggaatgccagggttgggaagtgctggaactggatgacgaccgggaagaagccgtcttctatgggaaggacccttcctaccctgtgcgggtggaaatccacgtgcgctctcacagggaatcggacacctttttgcagtgggcggttgttcggaacgaagggaaagaaggcatccgcctgcaccgcgttgcgtccgcacaactgggtttgcgcgcagaacggtacttcgtcaccagcttccgcggtacctggggcggcgagtccctgatgagtgaggaagaagtggcccgggggcatgaacttgccctggtatccggaaccggcacccgcaccgcccaggagggaagccccggattcatcatctctctggacggtccggcgcgggaggattccggggaggttgttctgggggcgctggcatggtccggcaattaccggatatggttccggcacagcccgtatcattacctttttgccggagcgggactggatacggctcccgcgccctatctgctggacggcggcggcgtgtttgaaatgccgcccctcattctgacgcacagtaaaaacggcaagggagaggcctcccggcgcatccaccgctgggcgcgccgctacggcttgcgcggcggaggaacagagaggccaaccttgctgaattcctgggagggggtgtattttacctttacggaaaaagtgctgcacggcatgatgaaacgtgcggcggacttggggatagagcttttcgtgctggatgacggctggttcggcaaccggttcccccgcaatgacgcccgcgcgggattgggggactggcaggtgaaccgcgctaaattgccccatgggctggaaggccttatccgccatgcggaagaactggggatacgcttcggcatctgggtggagccggaaatggtgaaccctcattcggagctttatcaggaccatccggagtgggtcatcggtctcccgcatcgggaaaacaggcaggaacgcagccagtatttgctggacctgagcaatcctcatgtatgcaggtacattcttgacgccatgcggaagctgcttggagaacatccgggcatttcctacgtcaaatgggattgcaaccgcaaaatttccgaccccggctctccctggctggacgcctgccgccaggggaatctgcccattgactatgtgcggggctatgaacacgttcttgatacgctggcatcggaattcccggatgtgacattccaggcctgttcttccggcggaggccgcgccgactatggaaccatgcggaggcatcatgaattctggacgtccgacaacacggacgcttatgaacgcgtgttcatgcagtggggcataggccacctgttcccggctatttccatggccgcccatgtgacagcctcccccaaccatcagacgggccgctccgctccgctcaaattccggtttgacgtggctatgtccggacggcttggctttgaacttcagccatgcgacatgacggaggaggatatggccttttccaaacgtgctttgacggaatacaagcgcatccgccccgtagtccagttcggtgacttgtaccggctttcctccccgtatgaaagccgggtggcctccctgatgtatgtatgcggaaaacgggctgtcgttttcgcctggctgatggataaatggctggcggattcccctccgcccctgcgcctgaaaggcctgaatcctgtcgccaggtacctggtgcgggaaatcaacatgaatgaagacggctctctcacgaacgttcacgaacaggtgctgggcggcgatttcctgatggacgccggcatccgcatccgctggaaaaaggccttccagtccgtctgcctggaggtggcggaaacaaaccctgatgctccggcttcatcatgaaatcggcgtttggcgtgggagccatagccgccttactgatgtgatgagttaggagttctcttagaggtgagggtatacagccaatgcggcagaagacaggcgcattccaatgccggtttgccgatattcctctctttttctacaggaaaaggccgatcattcaatcttgatgaggccctccctgatgagccgggccgcttcccgttctatttccttttgatgttgtttcatgtaggcctggtacgcttcctcaatatcgaaacggatggtcaggacccattcttcatcttcgttttctaactcgaatctcgaataattacggctgtcaaaataatcctgttcctggccctctccaacaattttgtaatccggataatgtttttttatgtattcccgctgtttttccaggagcttgtccaaatccttctcattaaacacagcagggttggtgatgacagggatatctttttcttcttcctgctgctgtgcgtccggctgccggggatgttcttcccgcgctgccgcgagacttcctgttttcagcatgaggaaaaacagaacaatgcccgtggtcgcgacgaatttcagaggatgattcatatggaattctgttatggctttttccctgggaaaacaaaaaaggtcgtgaacgttccaatgctggttcgtgtttcctcttcgttacaggaaaaggccgatcattcaatcttgatgaggccctccctgatgagccgggctgcttcccgttctatttccttttgatgttttttcatgtaggcctggtacgcttcctcaatatcgaaacggatggtcaggacccattcctcatcttcattttccaaattaaaaaatgaatatcgatgaccatccatgacatcatgttcctcgcccttccctctgatgcggtaatcgggataatgcttctctacatattctcgctgcttttccagaagtttgtctaggtctttttcgttaaaaacaacaggatttgtaataacagggatattcatctcctcggtttggacgtcagagggagcttcttgttgttgctcgctggattggacggttttttcttgtgctatagttagactagctattccttggatgcagaagagcacaatgacgagtatacttgatatgtatttcattgttttattttctattgatttattgatgatttttacaatcttcctttaattgtttttctaattgtctttcaatttgtcgtttcccttcattaataacactaggaatatcttttgactggtggaagtccactccgttccgcatgatattattcttttgggagatttgccatgatccaattagtttcttttgatgagtgaatcggtagaggtaaatgatatgcacattccggaatgccttatcagttttcatggcttcagatagcttgagtattccgctagcatttccgatagcgtcatagattactttttctaatgcttttgctgcaattccatccaatgtctttcccagtatctccaatgttgctgtcgaggctccattgggggttatgtaaggaaaatattttacctcatagtcacagtctttcgcttggacgggcagagaggtgaacgagcaaatggctactgctataacgtatgtgaggagtcttactattgatttctttctcatgtcaattttttttcagggtgttggagttcatttcgtcggtctttttcgtcagaatgaaattctttttaataaattcttttccctctctgtttaacttcccatccccccagatgcttaacagggtttgataggtttccacatagtatttttgcgtcttatccctttccgtcagcgcttcaatggctctttgcatcactttgaccgaatatttcttcatcttaggtgtccatacggcgtgttttcccttttgggtccatagggacagatgttttccggtaaagcccggcttgtattcggcgacgcctttgatttcaggacaatcccccactaatctgttccagaccaggcgggtaaaaagttcttccgcatggggcgtgcagtcggggccgagcgcgcaggcatagagttcatagggattcaccctgttttccctgatattcagcacgcttttcgccgcgtgccaaatgagattgtgctcattgggcatcgcttgagccagttccctgagtaaggcgagttttctccggtcgctggcgtttttggccttgatatccagataacgctgccacgcaggataattgaagggattgaattgacgcgcttcccgcaagagcaactccacatgttcctgtttttgtgtgcagaaggacagataatacgttaaagccgattcttccgcatgaggatgatgaatgaatgaatcgtaagccgtcaccagttgaacagggcctttccagggaatctgagcgctgccgctggcccaattccagccgccgagattgttgccgatttgccagtggccattggggtgtttccatacgaaggcgcagtgccccggctgtccaatcgggtaagcgggaactcctttggaacgcaggaatccagccgcgcctttggagacggcgccgcatactcctccgtattccgtgtaaagtttcagcgtgatgggcttgtggtcataaaaagcgcttccggcatggacgctgacgcctttgtcattctttttacggtagggaatgaatccgggaaatctgcttccggctttctccggcctgatttttttccctgcgataaattgctgtgcccatgccagatcttcaagaccttcttttccccggaatacgatggcccattcccagggttgcaaggtttctgcctgtggatagcatttggcgtggtgatgagaatcccggtagaagttaaatttggcgatgcattcttcaggagaaaagatgtttgcgacaaggccggctcccaatgccatgctgagttcaacgggattgaaattctgatcgctggtattccagatttggtaaaaaacggaaagagtacttttgccggctggaccagattgggcgagcatgttgaatacttccgggtggttggaaagccatttcctgaagacctgatccttgagttcctcctgagtgaaaggtttccctccttcggcagtattgaaaaactggtgcaggcagcacaatgccgccacttgaggggattgaatcagttttcgtattttgtcggaggtaagcgggccggaatcaagccggctgcgcaggacttcccggattttaccggcaatgaaggaggaccgccctgaagaaagcagtgtttgtatgtctgcttcagatggagccagcgtgccaaagctctctatagacatgagcatgctgaagaggaaaagccagaagatgtttttcataaggtatgaaagacagacttaaatgcatggcaacacaacttgaaaaaatttcaataaaatatgatttttttgaatatgaaaaatacatttcatatttcgcttttatatcaaaatgatattgacggcaaaaggattttttcaaatggaaaattggggtcattggctctgagagacattggattttcggagctgaatccgggatgattttttgtccatccctcccgcaagatgatgaaaacggggttccattcggaaaaagaatggaaccccgtgctgaagcggtaaaacagagataatagttttcaggtcagatgatctctgccattgtcaaattcccaccacgccgccgatggtctggatgatgaccttggcgacgatggtcatcaggataagggctacgggataggcggtggcgtagctgaccacgggggcctgggagtccgtcttgctggcgatggctcccagggccggggtggaggtcatgccgccgcagatgccgcccaggcattccagaatgttcatcttgaagactttcatgcccacgaagtaaccggcgaacatgccggagcaggtgacgatgacgcccatgatgaagacggccgcgccgtgggtggctaccgtatccaccaggtccgctccacccttgatgccggcgtcagccaggaagaagaccagccccagatcctgcaaaagaaggcgggtgggacgagggatgtagccgacgatggggcccagacgtccgaagtggccgagcagcagggcgacgataagggggcctcctgcaatgcccagggagatgcccgcgccgttgccgaggctgaagttgaccaggcccagaatgatgcccagggagaggccgaagcccagggagagcaggtccgtctggttcatgtcctggctgcggtggccgattttgtccccgtatttggtaaggttttccggagaaccgaccacagtcagcacgtcgttgcgttccagcgtggtttcccccgtggggacgaaggtgaagcccaggcgggaaatgcgggagataatgacgccgtccgtgcgcagggttttcaggtcgcggagcttgtgcccggcatagttcttgtttgtcagaatcagtttgcggcgctccttctgggagtccatggggtagggattgtcgcatacctcccccagaaaggcgatgtcgtgaggcatggtgtcgctgttgcccacaatgaggacttccgttccttcccggaacgtgtcttccggagtcaggggcatcagcctgtcgttgcgaaccacgcgggtgaccatgcagtgcagaccgtccagcagcttgcagtccgcaatgttctggcctatcaggttgggctgtgtgacgcggacaaggcgggaaatgatgctgacttcctgcctggaatgcatggctttggcctccttgttgaggtcaaagcgcagcaggcgcggcaggagctggacgaaaaggaccacgcccaccacgccgaacggataggcgatgccgtaaccgatgctgacgccgcttccggaggctcccggcaggctttccgtggcggccgccagcgccggggtgctggtgcatgcgccggcaaagatgccggaagagattcccgcgggaactttgaaccagatgccgaagaggcaggtgaataacgctgacactcctacaatcaccgcagacatgatggccagtttgctgccctgtttggcgatggcggagaagaagcggttgcccgcgctgaggcccacgcagtatacaaagagcgccagacccagctgccctacgccgtcgggaatggccaggcggtagtggccggcggccagcgccacgaaaagaacgccggaaaggcccaggttcagtccgtatattttaatgctgccgagagcgatgccgaaaaagatgattccgaagagaaccagggtgttgtgttggagcaggatatcaaacataaagacggttagcggttttgttcccttccttggcgcagagcaggggaatgcccgtcacggatgagaatgcgtgcgttgagaaagcggagggcgcggcatatttcttccggcgcgtcagtttctccgcaggtaatccagcagagtggcctgatccaggcaggacatataaggcgtatggtcgatgcccttttccataatgaacctggtcagcagtttgcgggcggtcgtaaggagaacggcgggatcccagggcttttccagatagttgtcaatgtgcgcgtcattgacggcctggatagtgtccgcgtgggtggcctggccggtcagcaggattttgcgcgtcccggcgaaacggtcgtctttggcgatgcccccaagcaactctactcctgaacctcccggcatgacgtggtcggagataaccagtcccgtcagttctccgtcctggtcgaattcttccaacagttcgcggcattcggatgcggattccaccccttccaggcggaagcaggaattcagcggacgaaggtctcgcaaaacgctgtcaaggacttccggctggtcgtccacgcaaatgatgttaattttttccatgattgttgatggttggtatgattatcgtaaaaacggtatggcccggcacgctctccaggcggatgcggccgccgtagctgtccacaatgcgccggacgatggtgagccccagccccaggccgaaggaaagccccttctttttggtagtgaagttgggacggaaaattttttcatgcaggtcctttggaacgccggggccgttatctgtgacggagaccagaatttcgcgggtggtatgggatgtctggtccttgctgctgattttttccacccggcattctacatggatggaagggttgggggtattttctattttcagcgcgtcgcaggcgttctgaagcaggttgatccaaatttgaacgagctccgtcatatccgcgaagatgcctggcacggagtctctgggaggcaggaccatttcaaaatcaacgccgcgcagactggacttgaccagagcaacagcttccgtaagggaatccgccacgtttactccttcttcccgtctggtgttgcctccccccagcaggcgaacggaacggacaatggctgtagcgtgcctgacagccagtttcatgtcatgcaggtcgtgacccaattcccaataagggaggttttgttccagctggctgaggaatggtttgtccagcagctccggctgattctgtatgtccggaatcagggccagggccttggccacgtcctgggaaagcccgtaatttttttcaaactggcgcgccagcctgcgctgttcggaagtggatgcggaggaagtcccttccaatcctttgttgtacagggtataccggaaggcgttttcctggcggaacatgttgtccagggtttccaaaacaaagtctgttttacgggacaggactcccagggaattgttgagctcatgggctattccggcggataattgccccagggtggcggccatttcagaacggtggagcatccgcagcgcttcttccttttccgcagtgcggtcaaagacgcgggtattgcgtgccgccagttcatggacaatggcgggaacaaactgctccaggagcgtgccgtagcgttccacatccacggcgggggtggtggtgtcgatataggccagttccaaatcagtttccgcaatgagatcggaggagctgcggaaccatccggaaaagaaactttgcactcccaaatagtctccggggccggcccggaacgccttgtagattttgtgggaagtggaagctgtttccgggtcttctttaacgacatggcgggaggaaaccacgctgccggataaaatcaggtaaagccttttattctgttccccctggcggacgacggcgtttcccttgctgatggtgataatgcggtccggatcggaaaaatacgccagattaatgcgttttaattttttctggaattcttcctgttcaatgatcatatggcgcttttcccgttgatgttggccatgccggggcaacatgtcccggcatggaacattaccttacttaaaaagcatggcattgggcaagaatcatcatcatgacataggtcaaaatcatgcccaggatacccagaatgacgccggaaatggccatccccctggagctgaccaggccggtggcataagccagggcgttagggggagtactgatgggaaggctcatgcccagagaggaggcgaaagccacggataccagcagggcggtaacgccccccatgggagccagattgtcacccatgttgacgccgacgaccgcgataattggaatgagcagggaggctgtagccgtatggctcatgaaggtagccatgaacaggcagatgattcccgtgcccaccatgagcgggaagggggaccattcggcaaagggaatggagccaatcaggttttttgccagtccggtgtcttgcagggccagccccagggcaaagccgccggctaccagccagagcacgtcccagcccattttcttcaagtcttccctggtgatggtttccgtaatggcaaagacggcgatgggaatcatggcgatggtattggagtccagcccgtgcacgcccttgcccgttacccacagcaggacggtaacggcaaaggtgacgtaaacgataatggccttgggggttctcaggaatttaccacccacctgcagttccagtttcttttgagagatggggaacagccacagcaggagaagccacgcaatcaggatcatgacgatgacgaaaggaatgccgaacatgagccatttgccgaaggagacgtccagccccataccctgcaatgccttcagcgcaattgcgttggggggcgtgccgataggcgttccgataccgccgaggttggcggcgatggggatggccagggcaaaggcggcgcggcctttgtcttccggagtgaacagggccagcaccggcgtcaggatggcgagcatcatggcggccgtagccgtattgctcataaacatggagaaaagagccgttacggacatcagccccagaagtacgaatttgggattggtgccgaagggttttaaaagtactttggccaggttcatgtccagcctgtatttggttgcggccgcagccaggaaaaagccgcccaggaaaagcatgatgatgggatccgcgaaggtggccatcgtggatttttgctgcatggtgttgacaaattgcagcccctggatgcgcgaggttatttccttgctgtacaggcgcccggccgcggtcttgagctgggcggctatggattcctgcccggcggcttcttccgtttttccttcacgggacagttcctgtgcgttcagatctattttttcataagcgtccatgagctggaaccccagggtcatcctcacttcttccgcgtccagcttggttttcttatttaaccggttttcgacattttccttcaatttgccgactacctccggattgatccctttgcctatggcgtcatccagaatggaggataccgccgccttgtcatagcgctccggcatcaaaaatgagagagagccgttggagacgcacagcagggacagggtaatgaccatcacggaggtggtccagatagggatgggttccaaaatccagaagagcgccgccatgacgaacatggcgatgacgcggatttcaatagggcttaattggattccccatgaagcgaaaggcaggaagaagacgactcctgcggcggccaggctgatagctgccttgagcagcttgttttgggtttcactcatgaataatagctggtaatatggttggcgggcggaagggtacttcccgattttacaaatagaaacttttatttaaaaaaatcatgtcagaggggacggctgccgtttcccggagctggagccgggagctttctccgtgatgggaaaattgcgcaaccctatggggatatgcgtgtttagcagagataagtcaatcatccgttcgggggcgccgatttggccgagtgtttcctctgtattaaaaaaattctgaaggtagtaggttcctctatagccgcgcgacgtcaaatccccgctgatctggttgatttccttttccccgagaaggccagagtggattgtcgttcgaacctcaaacgggaaatttctgttgatcagataatccagcgtttgagtgaagcaggggaataaatccggacgcccggtaatggagccgaacagtttttccggcgctttgtaatccagggcaatataatcgcaaagcccttcctccaccagcgttttcaccacgccgggccgggtgccgttggtgtctattttgactgcgaagccaagctgccgtatattgcggcagatagggataaggtcgggacacagcgtgcactcgcctccggacagaaccaccccatccagaaatcccacccgatctctgagaaaatcaagatagtccgtccggtctccggcaggagaatccgttcccctgaccagggagacgttgtaacagtactgacaaaacaaattacagcctctcagccagaagatgcaggccaccttatttggaaaatccagcaaggtgagcggcgtgatgtctgctatgccccgacccgttcccatcgacttcgcatatgttgttgggagaattatcgcggctgttccgtttgggcggagcaggagcaggggcggcccggttccacgaagtggacgcggtcatggaactcgccctgtttgccggcgttgaaagtttctacagggcggtgatagcccatgacgcgcgtgtaaacggtgcagcgggtccggtcctgtgcgtatttgcttaatatttcctgtttggtcattgtcgtattaatggttgggtttgaagtcgggagcctattggaaaagggattttattcatgcctgtggatgtggagcagctcctcatcgcagaaggggcagtattcgtgctccccgcgcagatagccgtgcttctcgcaaacggagaagagcggggtgacggtgaggtacggcatgcggaagcgggtcagcactttgcggacaatgtcccggcaggcttccggggagctgatggcttcgttcatgtacatgtggaagacggttcctcccgtgtagcagcattgaagttcatcctgaagctggagcgcccggaacaggtcgcttgtgtggtccacgggaagctgggagctgttcgtgtaataacgctgccccacggggccggcctggatgatgtcaggatagcgtttctggtcttcgcgggcgaagcggtgcgtggtgccttccgcgggcgtggcttccaggttgtacaggttgccggtttcctcctggtattcctgcattcgcaagcggatgaattccaggatctcttcagcaaaggccctgccttcttcagaggtaatgtccatcgtatcgttggagaaattgcgcaacagctcgttcatgccgttgacgccgatggtggagaaatggttgcggaaggtgggcaggtagcgtttggtgtaggggtacaggccgcggtcatacatttcctgaacgaaggcccttttcttttccaggcaggatttggccaggtccagcagttctcccagcctggcgaacagggcctcccggttttgcttgaacaggtagcccagccgggccaggttgatggtcaccacgccgatggagccggtcatttccgcggagccgaagagaccgccgccgcgtttgagcagttcccgcaggtccagctggaggcggcagcacatggaacgcacggcatccggcttgtaggcccgttcgtcaggcacgcgttccccgtgttcattgacggtgtactggctgccgatgaagttctggaagtaagaggaaccgattttggcggcgttttcaaacaggagaggcacgttttccccttcccagtcaaaatcttccgtgatgttgacggtggggatggggaaggtgaagggctgtccggtgctgtccccttccgtgagaacttcgtaaaaggccttgttgatcaggttcatttccttctggaaatgcttgtaggtcagttccgtcagcttgtttgccccgcgttccctcgccagggcgagcaggttcgcgtcttctattccttcaaagaggtgttcccctccgctgaagggggcctggtcccgcaggtcgcgcggcacagtccagtcgatcgtgacattggtaaagggagactgtccccagcgcgagggtacgttcaggttgtaaacgaaactgcggatgtctttcttgatgcgggggaagtccgtctggtccttgaaaacgtagggcgccaggaaggtgtcaaaggagctgaaggcctgggcgccggcccattcgctttgcagaatgcccagaaagttcgccatctggcccagggcttcccggaagtggcggggcggtctgctgttcacgcggctgcgcacgccgttgaatccttcattgagcaggttgcgtaggctccatccggcgcagtatccggtcaggcaatccaggtcatggatgtggtaatccccttcccggtgcgcggctccttcccgtgcggagtaaacctggtccagccaatagttggcgattaccttgcccgccgtgttgttgatgagccccgcattggaatacgtggtattggagttggcggcaatgcgccagtcgctctggccgatatattcctctaccgtctgcttgcagtccacgtaggtattgccggaataaaggccgccaagctgttcgcgctgcatcttgtgcaggaaacggtaggtgatgaaggccttggccgtgtcaaaatatccggagcggaacagggcgcgttcaatcatgtcctgaacctcttccacatgcgcgctgtcctgatggctcagcttggcttccacctcttcatagatggaacggttgtaggcggtcccggaactgtggaaggcttttctaatggcctcttcaatcttatagccctggtattgttcctttttcccggaacgtttgatgatgcttgttgccatggtgggtttctcgcttggaaagggtggtgaccgctcatccgcgagcctgggcaaaagcctggaaagaccataggcaggggccgaccgcatgtgtgcattcccggaaagggagggcatgccgaagacctgtgcgtatgttcatcctgtccgcgggatgggaatacggcagcatcaggtcgtcttctggcttccggtgcgacatgtgatggggacttcccggctgcctgggcagccagtgtccggtccatcgtctaccggttacagcggcgcgtccgcgacggattttcaccgtcttccgttacctgcgctggaacgcaatgaatcacagaaagagacctcccgcaagaaaaatgtataaataatgtgttaaataattattcatatgctatatatggtatatgacggtagaaaaatgattgataacacagctttcttttccgtcatggcaccatatatgcccttgcgttcctttcccggtctggaggagcgcggaaaaagaaaaattcttgttacaagaaaattccagccttcttttcccgtatgatatgacatgcgtttctttgccttttcaaaaaatggatggaagaaatactttctgttgccggtcctttccatgctttccgcaggaacttccgtttccggggcttccgcagactggaatgaaaagaccatccgggacaatcttcagctggtggcggaatggcaggcgaagcatcccaaaaaacgttcgccgctgcattggacttacggtgccttttattccggcctggtgcaatatggcctgtccgttccggaagggccggggctgccgttgctgagaaaagcgggagaagagcaggaatggaagaccctgaaccggcattatcatgcggacgaccatgccgtggggcatgcctggatggagatggcgatggaagacggcaatcccgccgcagctgaaaagattcgcgccgtgctggacaaggtgatgaaccggccttcctccgcttccctccaattcctgactccgggctgccaggaccgctggagctggtcggacgccctgtttatgtctcctcccgtgttcgtaaaactggcggcctataccggagaccgccgttatctggagtttatggatagggaatacaagcttacctgcgactatctttttgaccgggaggagggcctgtttttccgggattcccgctattttaccgttccggcggcaaatgggaaaaagatgttctggagccggggcaacggctgggtgattgccggattgcctcttattttgcaggacatgcctgcggactggccttcccgccccttttatgaagacttgcttaaacgtctggcggcagccctgaaaaaatgccagtcgcccgacggttcctggcatgcgagcctgctggatccggacgaacctcccttgaaggagatgagcggcaccctctttatcatgtacgggatgctgtggggagtgaaccagggatatctggatgcggatgaataccttccctccatccgtaaagcctggaaggccgcctgtgatgcggtcagcaaggagggcgcgctgggctgggtgcagcctattgcggacaagccgggccattattccgggaaagatacggaggtgtacggcgcaggggcctacctgatggccgggagtgagttgcgtaaatatgtcattggccgggatcatccgcggaaaaagaccgtgaccgttacgaatcccctgggcaggttccgccctgctgaaaccgtgtcggttccatggccgtccggaggttccggtgatgccgccggccttcgcgtttttgacgtccgtcacggacgtgtcatcccgcatcagctggcggatacggatggggacggaacgacggatacccttttgttccagagcaatttccgtcccgggacgatccgtgatttctggattctggagaattcctgcttgggcgaagcgccttccgcggatgtctgtttcagccgtccggtaccggagcggctggatgatttcgcgtgggaaaatgatcttacggcgcaccggatttacggtccggccgtcgccaggccagcccctgagggagagggcctggtttccagtgggacggatgtatggagcaagcgcgcgggtgctcccgttatcaatgaattttacaaacggggggattaccaccgggatcacggttggggactggatatgtacaatgtaggtccggggcggggctgcggcggcattgccgtgttcagggatggaaaaccgcatgtgtctagaaactgggccggcgcccggacattgtacaatggcccggtccagactgcttttgaggtggtttatgcaccgtgggacattggcggcggcgtgcgtgtggcggagacgcgaagggtgacgctggatgcgggaaaccgtttctccaaagtccgcagcgtcttgaacgtccgggggactgaaacggtgaaggccggtgtgggaatggataccggaaagcgcagaaatgattatgaagcggttatggaggaccgggagtccggcggcctgatgaccgcatggagcaggccccggaaggatgacggatgcctgggaaccgccgtaatcgtgccctgggttccggaaggccgtgcggtggatacggaaggctgtacctacttgctcaggaaggtcgcgaacggagaaccctttgaatggtacatgggggcggtttgggacaaggcttctcccattcggtccgctgccggctgggaagcggaggcgcgccgtgtccgggagtgcatcggccatcctctgcaagtccgggtgcggtaggagccgccgcatcctgttgtttctcgcggagcgcgtggcggcttccttttgctacggctgcggcggtgcgggaatgggctgccattccgccagcgtttccggctggaggggggccggagtttcccgcgcgtccggagaagccagattcaggtcgttcctgacgatttccgaccggatggaagccagggaaagaagggtatggaagatgtggtcgtgggagacggctttcagccggttggctttcagggcgcgcaccatgtccggatagcgtgaggcgaaggcgtccgaataccagatgaacatggcaggccggtaaacaggcggcaggatatggccctggaacatttttccttcctctcccagcgctacgccgtggtcggagcagtaaaaataaatggcgggcctgttcttcaacagtgcaatcatgcggtgaatggaggcatccaggtcgacgatggaattgtcataggcattgacggtttcttccagacgggccttggggtcgtccatattgcaggatgccggggtaaaacgttccgcctgcgcgggatagctgaacgccatatggctcccgttattgtaaatgatataaagctgcctgttgcggccgaagtttttcagggattcctccatgaccagggaagttctttcctgcatcattccgggcgtctggtgctggagcggcgtctgtctccgttcacggcagttccgtgtcaggatgcccagggaataatcatgaatggaatctccgctcaggtccatgatacggacggtgcggaatccgtgtttgttgaacaggtcaatgaaggaggagtgaccgggagtgcggcggcacagttccgcatccgtaaacatgccgatggcggaaattctggtcacgatgccgaaggaagtggcgtgggggaaggaaacgacgttgggctctctggaaagccggggcattgtgttccgatggtaaccgttcaggggaagatggtccccccggacactctcccccatgtggaaaaccacggccaggtcgtctggggcttcgcactgggaaaggggctccgcgcaggacggaaggttccgcaatgtgttgaaacgccccgcatcctgggtgatgtattcgtccgccagtttgcacgtcattgcaatatccacgagaggccagcctttggccttgtcagacgtgtagtaaagataaaggggttccgagctgtaggaggctgccggaatgctcagcagcagaagggccgcgtacaggccccaaatgcatgccagtgcgccccacgtggctttttggcgcagggaacggcggctccagtagatggccaggtagataaacccggccagaagcagggttcctgcaatggaagcgggggtgcagaaggcgcaggcttcctggaaattggtctccgccatgctggaaagcacggaaaggttcagaaccaatccgtaccgcatctgcatcatgtacaggcccgcattgaacagaatgatggcgggaagaaggacataggcggtgaagcggtatttcaggcagagaagaatggtgccgcagagcagggatgcggagcaggcgatgcccatgctgctcatcagcaggctttggccatcgttgagcacatagggattggccgccagcgccgccgcaagcccggctgcccacaggcagcgcatgcggcggggaatgaacgcggcgcgcagagcctggcagacagcggccgacaggccgtatgcggacggataccgttctgcggaaccggcggatgcatggggagggatcatcgcaaaggagggataaagaatgcttcctgcttaaaaaggcggaagaaattataagagtttcagaataaatcgcaagcagaatgtaggagaagcttttcgcggagtggccgcctccgtaaaaagggaagggttttcttccatggactgctgcagcaaaaacagaaaaccgcccggaatgttccgggcggtttttaggtgccgtggatggcctccggtgctcaaacggagtttatccgatgacgaggaatttttcagccttggtgccgcagagggggcacgcatccacgccttccagagatttgaacgtgtctccgcaaaccaggcatatccagtattgcctgggcagggaactggtatctccgctttccagggccttcagggcgacggaataaaaatcggcatgttctttttctgcttccgtggcccacgtgaaggaacggacggcggctttctgcccttcttcttccgccacagcgatgaattccggatacatgctttcaaattcatgggtttccccggcaatggcggctttcaggttttccgcggtggttcctacatggatctggatatcgatgggctccattgttgcccccagcttttccagaaccttgttgtggttggcggcgtggacggattccgccttggaggcggcttcaaacaatttctgaataaggggctgcccttcctgggcggctttggcggcataggccgcgtaagtggcggaggcggtgctttcgcccgtaatggcagctttcaggttttctatggtcttagtcatcggaaataaatttataataattctaaaaagatgcaactaaaaaaatccttcaagggaggaaaaaacgcaaattcctctttctgcggcatcacggggagccgttacacaatgattcattgacgcatgcatggcgaacctgtacaacggaaacgttatgaagagcattgtaacaattagttcggcatgtgccctggcatttgcaggtatggcttccgcccaggatgccccggctccggcacccgccgctgaaactcctgccgcgcccgttgcgccggccgctgaagtttccaaggaagcgaaggaagccgctgatcagatgctggcgttgatgaaggaaatgtccgccacgctcagcacggtgaaggacaaggccactgcagacgcagctgcggaaaagatggcaaaaatcaatgaaaagggggaagccctttccaagagcgcccagaaggttcaggctgaaatggatgccgccatgcaggcgcgccaggccgagcttctgcccattttcatgggcatgatgactgacatgcagcgtttgcagcaggccgacttttacggaagccaggccctgaaggacgccatgaagcagaccggcgctaccggtccggaagaagatgtggaagtggaggaagatgtggaggtagaagcagttccggcccccgctcccgtccagaaggaagcgtccgcccccgccgccaagtaactttctttttcaggattgtctctcctccggcattgcgagatgccggaggatttttttatggcagggccgtctgaaaaagcctccggggggtgacgcaggaacctgcggtatgcctggccgaatgggagaggacggtgtccggagtttgccggaacatttgaaggaggctgaaaacaggcaggccgcctccgtttccggtgcggcctgccgggtagtgatgaatgaatggccagacctgttatttggcctttttcttcttggcagcggctttggcgggcttggctgccgtttttgcggccttggcgggtttttccgccgggcattcgttgacggagttccaggaccagtcccatttgtccacgttcatggcgcaggcggtcagaagcgctacggaagcgtccaggtcgtctttgtgagccatttcaataacctggtgcacattgcgggtgggaacggaaatggccccggcaatggaaccgcccggaacgaatttctgcatggctccggcatccgtgcctcccgccggcagcatttccgtctgccatttaattttgttggcgtctgccatggccttcatgaacttgaccatgcggcggtctgcaatgacggaaccgtcatacagcttgatggcggcgcctgcgcccaggtgggaaacctggtcgtgcgccggagttccgggaatgtcacaggcgatggtgacgtccagggcaatggagaaatccggttggatgtccagcgtgccggcctgcgcgcccctcaggcccacttcctcctgaacggtaaaggcggccacgaagttgcaggagggtttcttcctggaagccttaatggcgcggagggcttcaatcagcacgtagcatccggctcggttgtccagagatttgacgttcacgcaatcccccatttccaccaaatcccgttcacgggtaacggagtcgcctacggaaacgtatttttccacttcctccttgctcatgcccaggtcaatgaagaagtcggtcacttccggcagcttggtgcgttccgccggggacatgacgtggatgggtttcacgcccatgacgccgatgaggtcttttttaccgtggacgatgacgcgctgggccgtcagcgtcttggcgtcaaagccgcccagaggcaggaatttgatgaaccccttgtcgtcgatgtgacggaccatgaacccgatttcatccatgtgggcggcggccatcatggttttttccgtgtttttgccttccacgatggcaatcacgctgcccatgttgtccacgcgcacggcgtccaccagcggggccacttcctggatgatgaaatcgcggattttgtcttcaaaccccggagcgcccggagtcacgcaaacctgacgaagcagttccaaattcataatgccgccaatgtaatggttttcatgaaggttggctagcccataatgcggcctccggaaggaggcgccgcaggaacccgtctgccgtgcttaacggcgttcccgcgtaatgacggcctccggctgtgcgggggctccattgtccggtcttttgtaattgacgccgcgggcgtccaggaagggaagctggcggtcgaggcgtttacggaaatctttctcattttttagctcctgcggggtccaggcaacttccgccagcgccagggcgcgggggaagacatggtattcccatttcggcaggttcgggatatattccgtccagatgttcgcctggcagcccagcacctgcttttcccgttcccggggcgttccctgcgggacggggtccagcccataaacgcgctgccaggtcaggttgtcgttattgatggtttcatactccggtactgaaggtttgccgggcccctggtcatagtcaaagtacaggtggctgttgggcgtcatcacaatatcgttgccccgtgccagggtttgtgcggcgatgtgcggcatttggctgcgccagaccatcatggtagcggtgggggaaaggcccccttcctggatttcatcccagccaatgagcctttttccgcggttattgatcattttttccacgcggcggatgaagtagctctggagttcgtgttcattggccaggccgttgtccttcatgatccgctgggcggagggagactgtttccactggttcttgggcgcttcatcccctccgatgtggatgtaggggctgtccgggaacagggcgcatatttcatcaatgacgtcttccagaaaacggaaggttttttccgtgggggagaaggtataggagtgcacgccccaagtttcctgcaccctgggcgcatagcccgggatgtccgtattccccagttccggataggcggcgatggctgcggaggcatggcccggcatttccacttccggaatgacggtaatgccgcggtctttggcgtaccgtaccacatcccggatttcatccgcggtgtaatggccggagtaggggatgccgtctcccttattgcggttgccgatgacgggggattgagcccgggcgcctcccacggttgtcagcctggggtacttggcgattgggagacgccacccctggtcgtccgtcaggtgccagtgcagggtgttgaatttataccgttccatcaggtccagcacttttttgatgtcccgcacgggcatcatgtggcggcagctgtctaccatcaggccccgccatgaaaagcggggctggtcttttacgtccatccggggcagggccggagctccgtttttgtcggcagcgatgctttgaacgagggattgaagggcatacagggttccgttcacggaaccggaggcaatggagatggaatccggcgttacggcaaggcggtagccttccctgctcagggaagcgtcttccgtaaagatgatgtccgcattgtttttaaccagcaccgtattgattccattatcgcggaaaatccgttccgcctgcctggaaagcggattttcttccgggagcctgacgccgtttttcagggaaaagccgctttctccggtttgggcgcgcagggcggcgggccggggaatcatatggggcgcttcgagaaccggagcggatggggcaccccagcaaagggaaaacaggctgaaaaccgtggcaggaaaaatacacttggaaatcatagcgtacgtaaatacgcggcattttccggaaaaattccgtttcggggttatttttgcaaatgcagagaaaaccggcatatgaaaatagcggttgttccgcccgggcgcctgtgagagtattcccgcgctatgaatgaagccgcttccccccgcatcaggaagacgatggtatttgtgctgctggcgctttttctgggccagttcggaagcggtgtgtatgatctcattttcagcaatttcctgcgtgatgcccagcatcttgacgtggagatgcgcggactgattgaattcccccgggaattgcccggcattctgtctttttttgtggtcagcctgcttttcatgtttaatgaggtccgcatggccggggtggcgtgcctgctgatgttcggcggcatgtacgcgctggctttctgcggcgccggaaccagcctgtggactttgtctgcgtggattttgacggtgagtctgggtcagcatatcctgatgggcatgattgacaccattgtcatccatacggcgaggccggaaaaccgcagtctgcggctcggccagatgaaggctctgggaacggcggccgcgctgctgggcgcgctgtgcgtgtggatcaagtggaaattcaatcaatcttttgccgtggactttttcgtcacggggggcgtgtgcctgctggcatccctgttcctgagccgggtgaagacgcccgtcttcccgcagcggcgcggatggaggcaatgtttcgtcttcaagcgcagatatgccgtttattatggattggaaattctgcacggcatccgcaagcagctttatctgaccttcggtttctggctgatggtcagtacgctgggccagtctcccggatatatcggaaaaaccctgctcatggccggcgtcatcgggctggtcactcaacccctgatcggctggagcatcaagcgctacggggaacggaaggtgacgattttcgacagcgtggcgctgtccctcctgtgcctggcatacgccttcgctccggaactgctgcccctgcattgggccgtgggagtagtgaccgcctgctttgtcctggacaacctgctgtttgccctaggcatggcccggagcacctacgtggcccgcatctgcgagaagccggaggacattacgccaagcatttacaccgggctggccatcaatcatgtggcttctatcgcttacggcgtgctgggcggcgtgatctggatgaatacgggcggcccgcaagcggtgttcctgataggcggtgcggctaccgtcggggctgggctggtggcgcggcgcatggacaggccgcagccttgaccgggcgcctaacgcacgggtttgtccgcaccttttttaagggcgttcataatcttgttgaagatatccgtattttcataaatgccggtgaagtcgccgcttcccgcgccgaaggcatacaccggaacagccacgccgtcatgactgccggaaccgaaccggcccgttatttccccctgttcccggctgccgcccgtgagagcgaacgcgcccgtattatggtccgccgtgatgacgaccagggtgccggggtgtttggaggcccagtcaagcacggctcccgcagtccggtcaaaatcaaggagctcttccatcatttcttccagattgttgctgtgggccgccttgtcaatgttggacccttcaatcatcaggaaaaatccgttgggattccgggaaagggtatccagggctttcactgcggcctggcggaaaacgtcgccccgtttggagggagggggaagattacccggagcggcgacaaccagcgtttttccggaaggcaaggctccggctttttcccaggagcgggcgacacggtagccctgcgcctgcatttcctggaaaatatccctgccgtccggcctctgcgtgaagtatttgccgccgccgccaaagatgaaatcggcgcgggaacgggggtaatccccgatgatgccgtaagcatccgatcttttttcattattggcgcagaaagatgccggggtggcgtcattcagctcgcaggtagcgatgacgccggtggatttgcccatgtccgcagccttgtccaccagggaatccagcttgttgcccctggggcatacggcgacccgatggtaaagcgtcttggttcctgtcgccatggcggtgcccgcagcggcggagtccgtgaccagcttgtccgcgcaccatgttttggaaatgcccgtaacaggacagttttcaataaacaggcggcctctgttggccgcccatgccgcagaaaggtgatgaatgcccattccgtccccaatcatcagaatcacgttggtgacgggaaggctgcggtcaggttccgggatttccgtcaccggataggggcgttccagaatgaagcgctggttttccgccgccggaagcagggacggggcaagaaagagggcaaaggctaaaaggcgcagcggagaagtcatgcaatcactttcccgtttgcggcggaacaagtaaagaggaaaaaacatgccggtcccgcatggaaccggcatgaaccgttcaaaagaacttatttggcgtccgcctgtttttgcaggatgtcccggatctgttccagaaggacgacgtcatccggcttgggagcaggggcggccggagcttcttcgctcttgcgcctcagggctccgatcagcttgatggctacaaagacggagaaggcgatgatgaggaagtcaatggtcgcctggagcaattcaccgtattttaattccacatcgcccagtttcagcaccaggtatgccaggttgaccccggaagtaaggtaaccgatgatgggggtgataatgctggagacgaagacggagacgattttattgaatgcgccgccgatgacgacggccaccgccaggtcaataacgttccctttaagggcgaatgccttgaattcttccagaaagcctttgaggttgaaaaaatgagccatagtggattattgctggttgcggtggttattctgccgttaaaatgataaaagaaaagaaaaatgaatgagcggcggacaaagatgtgactgtcttccggggtaaaatgcggcaatcatgacgtggttcccaaaaaaatcatttacagacggggccagaagagcaaactacgcccatattaccttaacttatgaacacagaagaaaagctcaaccagtacgtactccattcctatggccgttatcccatggctgccgtccgcggagaaggctcccgactgtgggacagcacggggaagtgctatctggacttctgtgccggcattgcgacctgcgtgctcgggcactgccatcctgcggtgacgcaggccctgcaaaagcaggccgccaccctggtgcactgctccaacctgtaccagatcccccagcaggcggatctggcggaattcatcgtgaccaaatgcgtggagcgcccgggaaaagtctttttcgccaacagcggtgcggagtccaatgacggtttaatcaaagtagcgcgccgttacgggcaccgcaagccccagccggacggcaagccccgttatgaggtgcttacgttcaacaaatccttccacgggaggacgctgggcagcatgtccgccacggggcaggataaaatcaaaatcggctttgaccccatgctgccgggattccgccatttgcctttcaacgatctggaaacggcccgcgaagccatcaggccggaaacggtggccttcatgctggaaaccgtccagggagaaggaggggtcaactgcgtgactccggaatttctgcggggcctggcgcagttatgcagagagcacgatcttcttctgctgatggatgaagtgcagtgcggctttggccgctgcggcgacatcatgggatggcgcgccgtagctccggatgtggaaccggacggcatttcctgggccaaggctctgggcggcggtttccccatcggcggcttctggatttccgaccgtgccattgacggccagggtacggagctttcctccatcatggatcccggctcccatggctccacgtatggaggcaacccgctcggcactgcggtaggcctggccgtgctgcgggaagttgtttcccaggggctcccggagcgggcgcggcgcctgggcgcggaaattcgcagggaaatagaatcctggaacctgcctgttgttcagggcgtgcgtggcctgggcctgttgctgggcattggcctgaatccggaaatggtagccgcgccggagggcaagacgatcgcctccgtagtggtggaggccctgcggcaggaagggttgctttccgttcccgccgggccggaaaccgttcgtctgctgccgccgctgaatgtcagtgaagaggaaatccagcaggctctggccatcatcaggcgcgtgcttaaaacgtacgccaaatagaatacagcccttatttgctttattgttatgaaggaagaagccattaaagcccccggcagcacgataaagcaatattccatcatgctccagaaccgggtgggggccctgaccgccctcctcggcctgctggacatgcacggcattttctgtttgggattcagcatgcaggactgccatgaggcgactattgcgcgcctgattgtcagcgatccggaaaggacgtcggaaatttttctggagaaaggtatttgctatacggagtccggggtgctggtggcggtgctccgccatggccctgcagacctcaaaaaatgcctggatgcgctgtatgccgcggaaatgaacgtcaactttctctatcccctgctgccttgcgtggggcgggggtctctggtggctcttcacgtggaggatctcaacttcgggcgcaccgtgctgaattccagcggcatcaaagtcctgttccagcaggacctcagccggtaggaacagccgtttttcctttcttccccgctgccctgttcaggagtgttttctccaagcgcctcaaggggttgcccggctttttcgccttgacgggaggggaaaacatggtatggtacgggccgcatggcaaaagtacccgtaatcaatcttcgcaagggacacgcggtcaattacaacaatgacgtttgcgttgtagtcagcatggagcacaagtgccccccccgcatggcttcctatgtgcaaatgagcatccgcagcatttccactaaaaaggtgtataaccttcgcctgacttccaatgaatccctggaaggcgtcaacctcgcccgtgaggaatatgagttcagctacattgacggcatgggttatcacttcatgaatccggatacatacgaagacatcaccgtgtctccggaaatcgtggaacccgtcaaggattatctgatggaaggcaatatctacatcctgcttttcacggatgaaacggtcgtttccgtagaactccccgccgccatcaccatggaagtggcggaagctcctgaaggcgtcaagggcgacagcgcgaacaatgtttacaaatccgccacgatgaccaccggactggtggtgcaggtgccccttttcatcaagcccggtgaaaagatttccgtaaagacggaagacggttcctatctgggccgcgtaaactgagttgcccctctttctgttctttgaagagccccgtccggtttgtccggatggggcttttttcatgccgcaatgcctgacctttttcctgtttccggaagagggcggttaacttttccgcgcggtatggaatggttcctttatggggggaatcctttttctggtaaatgcgaacgtagtctatttcatatttctggggcagcggcagtttgtccagatctccgccggtggcgcccagagccaggttcaggatgatgaagtgaggctgccggaagggattggcgacttccttgtaagaggcgttgacggtattatccaggggagtccggttcagcagaatatcgtccgcatacaggcgcacttccttttcatcccagtccatacggaagacatggaagctgtccgcccagtccgcgtgtttttcctggagccatttgagcggcgtgtaagtggtactccatttggccacgtcctttttgggggagccccagcagagattggccagataggtggactggtagtactccatgatgtctatttccccgcacatgggccacttttccttgacgcccaaggtccagaaagcaggccacatgccttcccgcgggctgaatctggcccggatttcaaaccgcccgtacagccaggaaaatttgccgcgcgtcgtcagggaggcagaggtgtattccgcctctttccgtgtcgtctgccagttttttccctccggatcgtaatgggggttggcatgtttttccttcctgccttcaataatcagcatgccgtctttgcaataggcattttccggctggtaccattgcgcttccttgttgcggacgaaaccgtgttcgtaattccatttggcagggtccggacggccgtctttgtcgaattcgtcgtgccagacgagttcataatcggaataatccgctttttccacgactctctccgtttttttgacgccgtcaccatggagggtgtaaagctgggcgtggaggggggtggacaacaaggccgcactggccaggatgttgaatagaggaggaatgttcatggaagaaagtaaaggtgtttgttactggtacggggccgcgggcgtttttttgtcattttttatcagagggggctgaagccgcgaaagcggcttgaggaacggaataaatgtgttaggttcggctaacagtatggggtcttgtctggacccggaacatcaaacattccgttttaatgacaatggaagaaaagaactatcttgtttccggtatgcattgcgccgggtgtgccgccaaggtggagcgcgccgtggaaggattggagggggtggagcgcgtagagctgaatttgctgacggggaagatgaccgtcttgtttgaaaagcctgattcccccgccatggagcggatagctccggtggtggagaaagtcggtttccgcctggcggactggaaggaggagccgcttgccggaacggagagggaggaaaggctggaacaggaggaaacgggcggctcccgcctcgtttggtccattctgctgctggttcctttgatgtatttgtccatgggccccatgtggcactggcccgttccgggagggagttggggcctgtggatgaattggtggacacaaggcattctggcgggcgccgtcctgtggctgaaccggcattatttgataaacggcgtgcggcagcttgtggcgctgtctcccaatatggattccctgatcgccatcggttccggctccgcttttctgtatgggctgtatttgctggttgcggggatgtggcagggtttcagtgtggagggaatggagctgtattttgaatctgcggccatgatcgtcaccctgatttccctggggaaataccttgaacgccgctcttatcggaaaacgaatgccgccgtaaaagggctggtgaagctggtcccccaggaggcgctggtatggcatgacggcgcggagcgcgccgttccactggatgaaattcgttccggggacctggtggtggtgaaaaccgggcagcggattccggtggacggcatgattgaagaggggcaggcggctctggatgaatcagacctgacgggggaaagcatgccggtggacagggcggcgggggaccgggtgatcagcggaacgttcaaccgggccgggtatctcaaaatccgcgcggaacgcgtgggcggggattccacgctggcccgcatgatccgcctggtggaacaggccagccagtccaaggcgcccattgcgcggctggcggaccgggtatgctatttctttgtccctgcggtcattgccgttgccctggtatcgctggttgggtggatggctgccggggagggtttttccttcgccctcgccagggcaattgcggtgctggtgatttcctgcccctgtgtcctggggctcgctacgcctatcgccattatggtggggacgggcaggggcgcgcggctgggcatcctgtgcaagtccgccggagctctggaagccctgagccgcgtggataccgtcgtttttgacaagacgggtaccctgacggaaggggagccgcgggtagtggccgtgctgccggaggaaggcatggatgcggacgcgctggtggaaatggcggcggctttggaacagggttcggaacatcctgtgggaaaggctgtttatgaacacgccaggcttctgaatttgcctgtccgcgccgtggcggatttatccgtagttcctggccgcggcattgccggaacggtggatggggtgccttatgcggtgggcaattccggattcatgcaggataagggaatttcctggaaggaggatgaaagccgcctgcgggagttcatgcggcagggcgcgtccccgctgtatgtgggcaggggcggatgccctgccggcgtcatcatggtggcggattccctgaaaccggacagccgtgcggcggtggacagtttgaagcggatgaacctgcgcgtcgtcatgctgacgggggacaacgccgccacggcgcggcacatggccggagaactccacattgacgaggtggtctccgacgtgctcccggatgaaaaggcctcccatgtgatgaagatggaggaacgcggggacaaggtggcgatggtaggggacggcgtgaacgacgccccggctctggcttgtgcccgggtgggcatttccatgaagtccggaacggagctggcgatggaatcctccgacatcgtgctgatgaaaagcaaccccgcaggcgtggcggaagctgtccagctgggccgcaccacgctgctcatcatcaggcagaatcttttctgggctttcttttacaacatcatcggcattccgttggccgccgggtgtttatatcccgccttcggccttacgctgaatcccatgattgccgccggggcgatgagtttgagttccctgtgcgtcgtattcaattccctgaggctgcggggtttcaccccacgcctagggcgcctggggaaatagggcggcctctcccccaccggcgtttcccgttcaggagggctgcagcagggcctgggccagcgtgcgtgcgtggtctccgccgccgcccagcatgcggaccagttcatccacccgttcttcatggctcacctcccgcaggcaggagatggtgcggttgcccgcggatgctttctgaaccaggtaatgatgggaggccagggccgccacctgcgggaagtgcgtgatggagatcacctggtgcctgtttccgagctgctgcatcttgaatcccacagcccgcgccacttctccgcccacgttggcgtctatttcgtcaaataccagcaggggggtggcatccttgtgggccagggcgcttttaatcgccagcatgatgcgcgccagttccccgctggaggcaatcagacggagaggcttggagggttctccgggattggggccaaacaggaattccaccgtttccattccctgtgaacccggttcctgaaggggggagaggctcacttcaaagacggcctggcggaatcccagctcccgggagtgcctgacaatggaagccgccagcctgggcgcggagtcctggcgcgctctggtcagagcctgcccggcggcgtccatctgcttgcgcaggacggcgatggaggccctcagctcttccaggcgttctgtgcggtgttcaatgcggtccaggcggctggccgcctcctccctccgggagcagacgtcctcaaaggaggggccgtatttcattttcagagattccagcaggttgatgcgttcctccagctggaaaagttcccgggggtcgcagtccagttcggcggaataatccgccaggcgtccctcaatttccttgagttccaaattcactcccgccaatggagccagccacgcggcggtggaggcgtccatgcgttccagctcatgggccgcccgtgtcaattccctcaattgggtccccaggccgggcacatccgtttcctccagcatggaaagcattttggagacctgttcccggagccgggtgccgttgcgggcgcgttgccagcgttcttccagcgtgagcacttcttccggagtgaaggcggcggaatctatttcatccacctggtggcgcagcagttctatttcccgtgcggtggccgcttccgcatgttccaggtcatcataggcccggcgcgcatcctgccattgcctccaggcgtccgaataggcgtgcaccaggggagcgtgctccccgaaggcgtccagcagggaaagctgcctttcctgggagaccagggagcggtagtcgctggggccgtgcatgtccaccaggcaggctcccgcttccctcagcagattcagggtgcacgggctgtcgttcaggaactggcggttggccgtggaagagatgaggcgcttgataatcaggttgccgtcttcgcagggcgggacgccatgctcgttcagaatggcgtgcacgggggaggattccggcagatggaacacagcttccacgctgcattgctgttccccggagcggatgagcgtcttgtccgcccgttctcccagcgccaggcgtatggctccaataatgacggatttccccgccccggtttcccccgtgatgcagatgaatccggaactgggttcccagagcagctggtccacaagggccaggtttttaattttcagcaatgtaagcattcgggctttggattttgaatgcattatggcatcatttgccttaaacgcaatcatgacctctgtgatgaacattctctttttgggcacaggaacgtccaccggagtgccgcagataggctgctcctgcgcggtctgcacgtccccggaccccagaaacaggcggttgcgttcttcaatttatgtggaggccgctggcacccgcctcctgctggattcttccccggatttgcggcagcaggccctgcgggaaaatatcacggatgtggatgccgttctttatacgcatgcccatgtggaccacgtgggaggttttgacgatttgcgcgccttctgctggcgccggtccggcggcctgcccatgtatgcttctcccatgacggtggacgccctgcggaccatgtacggctgggcgttcgttcctaaaccggggcggagcgggtacgtcaggccggagcctcacgaggtgacggctccgttccgtgtggggaacgtgctggcgacgccccttccggtgctccatgccggggtggagacatatgcctatctcttggaagcggaaggccggagcctggtttacatgccggatgtgaaaagcatcccggccccgtccttggagaggatgaaaggagtggatttgctgattattgacggactgcgttatcatctgcaccccacgcacatgtgcctggaggaaacgttggccgccattgccgccgtccggccccgccgcgccgtgctgacccacctgtcccatgatatggattacgggattctttccggcaagctgccggaaaacgtcatgcccgcgtatgacgggctgagactgtccctgccgtaatgctcacgctgcatgttctcaggccatgactattccagacaattctgaccgtcccggcgcgcggataccgtgcgaaaccagaaacgtattcggcttttccgtagccgtcagttccgtggaagagatgtccgctgcgctggcggaacgcgcgctggaggcggaagctccgtttctggtggccgcggcggatgcccatgtggtaaccctcggcgtgcatgaccgggattacgggaacgtgctggaacggatggacgtgatttgcccggacggtatgccggtagtgtggagactgaaccgggggctttcttccggggaaagggaagcgtgccgcgtgagcgggccagatttgatggaagcgctggtgcgttcgaatgtgcaatatccgggcttgcgccattttttgctgggcggggatgagaagctgctggaagccctgtctggggcattaaaggaaaaataccccggttttcaactggccggggcgtattcccctccgttccgcccttggacggaggaagatctggaaaacatgcgggaggcggttgcttcaagcggggccaatgtggtatgggtggggctgggctgcccgaaacaggagcggtggatggcggagcagagggaattgctgccccccgcggtttatgtgggcgtaggggcggcgttcgctttccatgccggtacggtgaaacgggctccgcgatggatgcagaagaacggtctggaatggttgtaccgcatttaccgggagccgggaagactgctcaggcggtacgtgaagcacaacagcctgttcgtgtggtacgtgctgacgggcagatagggccgtttttccggtgtgcgtcccggagtagagccgcgggttattttatccttgtgccgttttcgtgcggccctatcatgattccgtttgaacctgaacggaaatggtgggcgctcttccctccttcgtccttaaccttgtttttcttatgttctttcgccgtattccccggaaaagctggtatgaaaaaactgtggaacgcgttttcagggacaggaagctgtgcgtggaaaagctgctctccttcggtttcgttcgtgtggaaagcggttttctgcgcagggcggcattgctggacggccagctctgcatggaattggaaatacacgcggatggttctgttcatgcaacggtgcatgatgcggacgggaagaatatccggcatgctgacccgggaacggaagacaggttgcggacaagaatgctccgcagggaatatgaggaagaactgtggcatgtggcggaatgctgctttgaacctgattttttcaaggcggctcccgcccggagcctcatcgcgcacatccgtaaagcttacggggaggaactggaattcctgtggaggaagtttccggggaacgcagtggtgcggcggaaggatacggaaaaatggtacgccgcttttctggctgtgccgcgcttgaagctggggggcagttccaaggaacgggtggaggttttgaacctgcgggtttgtcccggtgagtccgggattcttgcggataatcgcagccgttttccggcctaccatatgaataagaaaaactgggtgagcttctgtctggatggaaccgttccctttgaggaattggctgcgcgcctggaaaccagccggaggcttgccggaaagtgagctcctccggcgcgggatgtcgggagaaaccgtcttcccgcccccggatggacggccggaaagggggtcttgacccggaaagaggcggagcctacagtaagggcatgaatatagaagaaaaagctctgtccaccttccgcacggcgccctggcgccacaactgcgcccaggccgtctgcgcggccctgggcagggaggatttgctggaaaccgtttcctcctgcggtaccggaaaggctccagacggactgtgcggcgccctttacggggcgctgctgtgtacgcccgtgcagtccagggaggagctgaggcggcggtttgtggaaaagctgggctattcccattgcagggaattgaaaaaagaggggtccgtgccatgccgggattgcgttgcctctgcggcggttctggcttttaacctgagggagtgaacgcagaatgacactgccggattcatggtttttcatgaaaaaagagtctattggaatgaaaccagatagaataacatcatgaaaaaattgatctatatgatagcggcagcggccgttgcgattccggtggtggccctggcccagggagcctgcggcagcggctcctgctccaagggagacaaggacatggctgaagccaaagagcacatgaaagagggcgccaaggctgccaaggacgccgcctccgaaaaaatgaaggaaggcaggcaggctgccagggacgcctatgaaaagggcaaggaaaccgccaaggatgcttatcaggacagcagggacgccgttgaccatgcggcggacagggctgccgataaggccgaagccgtcggtgacgctgtgaaaaacggttaactcaaacgatgaacaataaaaatatttgcttattatgtgcgaatccaaggatcatatgaataagggctgcggatgtgcgaacgatgccgcttccggcaaaatggaggaaggcaagcacaagatgaaagacgcctgcgaaagaggcaaggaagccgtcaaggacatggctgaaagcgtgagcgacaaggccaaatccatgatggacaaggataagaattcttagtcccggcggcggttgaagcaagccgtttcccattcttcctcccgtgcgcgggatgacctccccttgtccggatttccggacgaggggatttttatgcgggccggttttccggggaaggggtgtcctgttccacgggctggagggcatgcaggctgattttatgccttttgcataattcctccacccggtcgcgttccagcaagatggttttgcccgcttccagggcgatttgcctgacgccgcattccgcgcacgtttcaatggtgacggggccgactgtcgggatatcaaagcgcatgtcatgccccaggcgggccactttggccagcgtggccggtttgccgttgcccagttcccctccgcggcgtatgcagttgttggtgccttcaatcgcttccacggcgatgacggtgccgccgtgcacgatgacggactgcccgatgtggagacggctgatttccttggccgtctgcatgccgaagcgggcatcctcccattgttcaggcgtgggaggcggtccggcgatatgccccggctgcggcatgtgctcctccatgtaggtggaggccgggaggatggtgaagccttccttttccgcttccgtgatgacggccccaagcagggagtccgcatttttttccggcatgcgcatcaatacggaaagggcgcgaaggtccggacggagggaaagaatgttcttcggattgatgccgccggccatgatgacgttccttacgccgtgctttttcaggaaagtgaacggcttgcttatctggcccacgctgaattcctggtaagcgtcgcacagggggatgacggcggggttggtttcccccttgaaccctacggccacgatacgcaattccggcatccggcggcgtgcgccccggacaatatattccggataaacgccgtctccggctaccaggcctaatacgggcgggtctgttgtcatgcggcgtgaagctgggggaacggggctggttacaggtattccgggcgctggagcaattccgccacgcgcttgagcaggcggccgatgtccgctccgtccaccacgcggtggtctcccgtagccacgatgttggccttggagatggggataaacgcctccacttcgtcactccagaccggggttttggtgacggcccccacccccaggataatggattcgctgggcatgggcatgggcgcggcaaaggtgaggccgaagccgccgaagttggtgaccgtggcgatgccgcccgtgctgtcttccggagccagcctgcggcggcgcgcctgggcaatcagcctgttatagtcttccagaagttcttccatcgtccgttcgttcacgcggcgcagcacgggaaccatgacgccgtccgccacctgggcggcgatgccgatgtcaattgttttgggagaaagaatgttttcccccaccaggtagccggcgcattccgggctttccgccagggccagggccagggcgcgggcaaagtacagggtgatgccgggccgcagcggggaattttgcctgtgcttgatgagggggtccatgaatacgggacgcccggcggaggccagcggacgcgtccagctgcggcgcatggcgtccgccacggccagccgcatggatgaggccttgcggtgcggccattggctgacatattccaggaattcttccaggtcgtcaatggtgacgcgtccgcccgccccggaaccggagatgaaagcgatgtcggaggcgctcatgcccaattcatccatgcgcgccttcatccggggggacatgtagtgcgcgcccttcatgccggcgggtacggggaggccgcgcacgctgggctggactttcaggtccgttccgttttcctgataggattcccccgtcaccccgaagtggacgcctgcgggtttttcctcccggggaggggcggagggcgcggcctggggaacggattccggactggctggaagggacggctgggtggaatctccggccggagtcgctccggaacgctcaatttcctcttccgtggcctcaatcatggccatgcaggcgccgaccacgacggattccccttccttgatgaacacatcgctcaggatgccgccgcacatggtggtgacccccatggtggccttgttggtttctacctcaaagatttcctggtcggcttctacggtatcgccctgggccgccagcaggcgcagcacagtggcttccgcaatggaatccccgagctggggcatcagaatgggtactttaggcatgatggaaactgggttgaatcaaatggatagaagatggcggatggaggcggcaatggattccagcgtggggcggtgcgccttccagaggttggggtgctgggggatgggggtatcccgtgcgttgagcctctggggcggggcatccagcaggtggaagccttccgcgacaatgcgtgaaacaacttccgccgtgacgcctccccacggaaaatcttccccgacgaccaggacgcggccggtgcgcgctacggaggcgataacggtatccatgtccagcgggcgcaccgtccgaagatccacgacctccacttcatagccgctttccttctcaagcaggtctgccgcacgcacggcttccggcaccatggcgctgtacgccaccacggtggcatgcttccccgtgcgggcgatccgggccgtgccgaacgggatgaccggggcttcccggtagttgtcctccgccttcagccagcggtacaggaacttgtgctccagaaaaatgacggggtccggaatttccacggcctggcgcagcatccagtaagcatccgctaccgtggccggagtcatgacgtgcaggcccggataatgggcgaacaaggcttccaggctctggctgtggaaagggccggtgccgggggttcccccgcagggcaggcgcaccgtgatgttggcgggaatgcccgtgcggtagtaatgggtggccgccatgttgacaatctggttgaaagcgatcgtgctgaagtcggcaaactggacttccataatgggcttcttgcccatgacggcggccccggtcaccatgccggccatggcgtcctcactgatgggggcgtcaatcacccggtccgggaacagctccttgaggcccttggtcgctttgaaagcgccgccgaaaacgcctatgtcctgcccgtacagaaagacgtccctgtcttccgtaagcaggtctttctgggcgtcgtggatggcatcaatgtatgttacgctcatgggaatattccgtttgctggcttaataaggtctccataccgtggcgttccagtcttcccggaaggggtccggttccggttcccgctgcgcggtggctacggccagctggacttcatcggcatactgttttttcaaagccgccgtttcttccggcgtgagccagccggcttccagcagctgccgttccgcgactgccacggggtcttttttttcatattcctctttcagctccctggggatgtaggaggcgtcgtcatgttccccgtgcccgcacatgcggagggtcttggcaagcacccactgggggccccggccttccctcgcgttattgacggcggtccggaaggtttccagcgtggccatgaagtccgtgccgtccgtttcatgcacggtgaatccgtagccgcggcccctgtccgccagggaggcttctccgaattccctgatattgggggtagagtaggcaaattgattattggttaccacgagcaccagaggcagccgctccacgttcgccatattggcggcttcgtgaaaagctcccgtggacgtggtgccgtcgccgcagaaagctactcccacggggccgggcagtttgccgtccaggcgcttggcgaaaaggcagccgatgacgaaagccaccgtgctgcccagatggctgatgggagccatatagccttccgctggcaggccccggtggacattgccgtcccgccctttcatatatcccagggcggaacccaggtaggcgcgtgccgcttcaataatcggttccccccaggtgacgcgtgccgcctgttcccggatgaacggggcgattacatcgtagccggcagtcagaaagacgcctccgcatgcggcaatcgcttcatgtccgcggcccaggtaaacgccccccgtaattttgcccgctttgtaaaggctggaaattttggtgtcaaaagcccgcgccagcaacatggccttgaaagccctgacggcattttcctttaagtccggttgtgtagtgtcgcaatgtgccaccccattattttatatgctgcataaggaaatgcaatgccatttcatgaaactgcctgagactttgtgtccgcaggcgcggggccgctccgcagggcggcggaggttcgcggggggcggttcccggctggcgggagcgcttttgcatcttccgctcccgccggcggatgcgcggaaatttccggattcatttcccacccggcggcaggctgcatctcagttcgaatttgggatttgccacatcgtaatctccgggaaacaattccttctccataatgattttatcatattcctgcgcaaaaaggtccggaaaaacgccgggcgcctccgcaatgccgctttcctgcctgatgacgcagagaaaggaggcggcgggcaggcgcatgatttccttcatccgccgggcgtctctgccggccgcttccacctccacatacaggaactgctccgtccctgctttccggtggaaggaaagcaggccggcttccgcgcccagccgcagctggcagcggttaatatcgtcaaagatgcgggtgataagaatgttaaattccggagtatgctgttttcccgcatagggcgccacccagcagtatttttccggcaatgcgtggatggcctgttccccatgaagcagaagatcttcttcccggcccatctgtttccggaatttttccagcaggcgcagcttttcctgaatatccctgattttccggtgtgccagcatggtgccgtgggagaaaagtttcttataatggatccttcgctggtccctggtcaggaagccgataaattccttcaggggaatatccaggaaaatgcaggcgcggatggcatccaccacgggaatctgggaaagagtgtagtaacggtagccggtgtccgggtccgtataggccgggagcaaaatgcccagttgttcataataccggagggatttgacatgtacgccggtctgtttggacagattgccgatggttagtaaattctgtttgtccatcctgtattgcggttggtgggagggaattgattgtttccgccggaagagccccggcggaaacgggagctgcgcgcagaagaaacctttctgaagacgaagttatttccgccattcattggatttttattgtcaacaatttacaataaatgacaaagaccttccccacttaatttttccattgcctcttgactctcccattatgggatactttacattatatggcaattgaaaaatccccggtcttgtcggaagtgcggttccggggtttcttgaggttccaaacagcatgattcctgatgaaaataattaatcttttattctgcatgcccctgctggtggtttgcttctcctgccagcgggagggtgaaagccaggcagccggattgcccggcgaaaccgtgccggaagtgtctgtcatgacggtacgcagtactcaggttcccgtaaccgccaatcttcccggccgtatggaagcgtatctccaggcggaagtgtgcgcccgcgtgacgggaattattcaggaacgctgctatcaggaagggcagacggtccggccgggcgatcttctttttaaaatagacccggctccgcttcaggctgtcctggatgaatgcaaggctgcagtggctcgtgccagggccgttctgtcggatgcggaggacaaggccgcccggtattcctccctggtcgccaagggcgccgtcagcatacgtgagcataagcaggccagggcggaggaagagcgggccagggcggaatatgccgccgcggccgcctctctggagcaggcgcgcctgaatctggaatatacccgggtggaggcgcccatctccggccgcgtgcgccgtgccctggtgacggaaggggcgtttgccaaccagaacgaattcacccacctgaccaccattgaacagattgaccccatttatgtccgcttcagccagccggcctcccagtacagcagcctgcgccgcgccgtcgtatccggattgtggaagggagtgccgctgggcgaaatcaaggtgcgcctgctgctctccaatggggaggaatacccccattccggcaggatcattttttccgacatggcggtggacccgaatacggatactattgaaatgcgggccctgttccccaacccggaccatgaactgctgcccggcgcctatgtgcgcgtggtatttgacagggcggtgcgggacaacgtcttcgccattccccgggatgccgtcatccgcaccgcgcagggcgcttccgtctttgttgtggggctggaaggagtgctggaagcgcgccccgtcagggcggatacgctgaacggccgggaatggctggtttcagaaggcctccgggatggggacagggttgccgtcagccacacgatgtccctccgccccggcatgaaagtccgcagcgccgccgcccggccgcaaccccatgcccagcaataaaccgccatgcctgatttcttcatacgccgccccatttttgcctgggtagtcgcactcctgatttccctgatgggccttctggccatccccagcctgcccattgcccagtatccggacattgctcccccggtcatcaccctgcgcaccacatatccgggggcttccgcccaggatacggaggaagccgtgaccgccgtcattgaaaaggaaatcaacggagcgcccggcctgatgtacatgtccgccaccagcagctccgacggagccgtggaaatagccgctacgttcacgcagggcacggatccggatattgccgccgtagaagtgcagaacaggctgaaaatcgtggaatcccgcctgccggaatccgtccggagagaaggcgtgttcgtggaaaaatcatccaacaatattcaggcgatgatctctctctcttctacaggcagcctgaatgatacggagctgggggaatgggcttccgcccgcatcatcccggaactgaagcgtgtgaaaggcgtcgggcgtgtggagcttttcggtgcggagacatccatgcgcatctggccggacccggaaaaactggaggctctgggcctgacccccacggatattgtcaatgccgtggctgcccagagcgagcgcatcatcatcggggacatcgggggggcggccgttcccgaatccgcccccatcaacgccggcgtggtggcggaggacgctttccgtacgccggaggaattcgcctccattgcgttgaggacgctttcagacggttcctccgtcaaactgggggacgtggcgagggtggagctgggcgccaacagctacgcgttcttttcccgctgcaacggccagacggccaccggaatggccattaagatggctcccggctccaatgcagtggaaaccatgggcctcctcaaggccaagatggatgaactgtccagggatttcccgcccggagtctcctaccagattccctatgaaaccacccacttcgtggaaatctccatccggaaagtcatttcaaccctgctggaagccgtcctgctggtgttcctggtcatgttcctgttcctccagaacttccgggctaccctgattcccacgctcgtcgtccccgtagccctgctggggacctttgccgtgatgtggctctccgggttctccatcaacatgcttaccatgttcggcatggtgctcagcatcggcattctggtggatgacgccatcgtggtggtggaaaatgtggaacgcatcatgatggaggaaggcctggatgcccggcgcgctacggtgaaagccatgaagcagatcggcggggccatcgtgggtatcaccgccgtgctcgtggcggttttcgtgcccatggcctttttcagcggagctgtggggaacatttaccggcagtttgccgtaacgctcattgtgtccatatccttctccgcgtttctggccctttccctgactccggcgctgtgcgccgccatgctgaaaccctcctccgtggagcaccaggagaaaaagggttttttcggatggttcaaccggacgatacaccggtccacggaccggtacggccgtgccgtatccggaatgatccgccgccctgtgcactccctgttcctgtatgccctcattattgcaggggccggctatttgtaccttacgctgcccacctccttccttccggaagaagaccagggcaacttcatggcaatggtgtccctccctgccggcacccttcagaaggaaaccagcgtgcggctgcgggaagtggaggattacctgatgcggcatgagccggtggagcacgtttactccgtgggagggttcagtttcatgggctccggaaccaacatggccatgctgtttgtcggtctgaaaaactgggacgagcgtcccggagaaaacagtgctgtccaggcgattattgaccgtgtcaatgcccgctttgccggagatggccagatgatggtcatggctctgaacatgccggctctgccggagctgggcaattcgtccggatttgacttccgcctccaggacaagggcggcctgggatatgcccgcatggcggaagcccgggacgagctcctggcccgtgccaacgcgaaccccaacctggcgggcgtttatttctccggccaggcggatacgccgcgtctgcacgtctccattgaccgggaaaaagccttttccatgggagttcccattgcggagatcagcaattctctggcggtcatgttcgggtccagctacgtgggggatttcatgcatgacagccaggtgcgccgcatcatggtgcaggcggacggaaaaagccgcctgaacggaaacgacattgaggacctgcatgtccgcaatgaccaggggaagcttctgcccctttcctcctttgtcaggctggactggacggcggggcctccgcagctcacgcgctacaataactatccctccttcaccatcaacggctcttccgcgcccggcaagagcagcggagatgccatgaacgccctggaacagattaccgcctccctgccgcagggcgtggggtttgaatggacggggcaatcctatgaagaaaagctggccgggtcccaggccacgctgcttttcggcctttccatcctgattgtctttctggtgctggcggccctgtatgaaagctggtccattccgttggccgttattctggtcgtgcccctgggactgcttggagccctgctggccgtcttcctgcgcgacatgcccaatgacatttacttcaaagtgggcctgattacgaccatcggcctttccgccaagaatgccattctgattgtggaagtggccagggaattttaccgggagggcatgaatgcggcggaagctgccgtagccgccgccaaactgcgcctgcggcccatcctgatgacctccctggcgttcggggcgggcgtcattcctctggcgttcgcccatggggcggcggccggagcgcagcgcgccgtgggcaccggcgtgctgggcggcatcattacggccacgctgctggccatcttcctggtgcccctcttcttccgcctgacggccggaaagagggggccggatcatccggaaggaatctgaggcaggattcccgctgcggaaaatttttcgtgaacgccgccgaagcgggttgccggagcgcgcttatttttcctgtggcaaaagccgcggaaaagagaattattgacaggcgcatttcgaatccgctgtcaatcctattattttagtaggaaatatattttttcatgccgccatggaaaccgtatgatttgcatgaatgaaaatatattgatgataaaataattgtatttctttttcatggctctccggctactggctgccgctgttcttcgggggaatgacgcgcgcctgccgtttccggcaggaattattttggaataagcgggatattttctaaaactttctctgtcaacgcgccatttgaacagcggattcgaaatccgttatttagcggctttcccaatattaacgattcttattaaaagatatgagacttactcttccatggccgttgcgccgttttctgctgggggctcttctgtgttccgtaacgatggcgaccgccgcttccggggcggaattcgtggtggacgccgcccaggcaacagatccgtccgggaatgtgtaccgcacgcttgacgaattggcctcttccggggcgctgtcttccggggataccgttatcctgtgcaatgatgattcttctctgacctcagccctgaaggtagctgtccatttctgttccaatgatccggcactgtcccgcaccatcagcggctcctcaagttctttgtacagatttaacagaatgcccatcaggcccggctcccagacaagtcccgatatatcgggagtacttgatgaaaatggagctgccattctgaaaatggattctatcattctgaatggaatgtcgataatgacattggatccattttctccctgtgtaaaaataacgggcaacgtccagtttgagaattccctagcacatgccatctcctcctccagagttgacttggacggagccgtctcgatggcgttggaaggccgctttgttttcttaaataataaccatgctctccatgttgtaggcagaacaaacttggtgataggagacaacgctctgttccggggaaattatggcaacagggtgcatgagggaggtgcgattatgagttacgggggacatgttatcataggagatcatgcggtattcgacaggaattatgtttccaacgtggagggttctttgggtggtgtattttatgattgcgtttttgcaggtgcaataactgtaggagcggatgccgtttttaccggtaactttactttcagtaccgacggaaatgctcttgggggcgcgatggcggttaggaaggatggattgcaatatgcagcagaaacaggggcaataaccataggacccaatcccagtttcatcaataattttgcttactccggaagggctgatgcttatggcggtgtgatttacagcgatggggacatttctttcagcgacggagtcacgtttatcaacaattatgccaaaacttccgggggagccatcacgatgggagggaaatgcgacctgctcgctctgacaaaggacgcgcttttcagcggcaacatgaccggaggcgtcttcacccgccatgaggacggcaccttctccgtggaaaacggcgtggccaatgccattgacatgaacggttctttgttttcttcactttatacgcccaatctgacgcttgccgcggaagaggggcgtgaaatccgcttcaacgacccgattaccagccggaacgaagaccccggccgccctatgaccctcacgctcaaccgctacacggacggggaggggaatgttcgcgacacggaaggaacgatcgtcttcagcggcgaactctaccagggagaagatacgcatcttgccgccagccggtacaacagcttcctcgcggataccaccctctatggaggcgccctcctgctggaacacggcgcggtcttcggcaggaatcctgaggaaataatggataaacgatacaactcctccctgacggtggaaaagggcgtgctggaaatcaccggaggaagcaaggccaacgcctccagcttcaccctctccggccctggcgccgtcctgcgccccggggacagagctttcatcagcgcccacaacgccgacctctcccgcggcttcaccttcgacatgcgccaccagctccaggccgggccggccttcggcccgggcctgatgctctccgctcaggaaaccttcacggccgggggatacatcggcgtggcggacacggaagccaacgccccctggttctacgcggaccgctcctggaagcaggaccgcgtcttccacgtgctgacggatgtgcagcacatccatgagggggactttgacggggccgtctcccaggccaccggaacggcccgggtggatgacccctacacctacacgggaacctggagccaccggtggacggacgcggacggcgacggctacgccgaacagctccagctggtctggaaagcggacggaacccccatcagccgcgttgacccggaactggccgggggactggccgtcaactccctctggagctcggcgtccaacgcggcggccctgggcggcaacgtcctttcccgtctgagcgccccgcgcctgaccgacaggcatgcccgcaacctgtggggcatggggctgggcgacttcgcccggcagcgcagccggggaggcgtggacggctacgactacaacggaggcggctactccgtgggggcggacagcggcatgggaggggaggacgaaggcatctgggggatcgccttcgggcagctctacggccatgccagaagccgggacttccaggggcacaacacgcaggacaccctgatgggctccctgtactggggccgcctgatggaagaaagcaacagggcgtgctggatcttcaagggaagcctcacgtgggcggaaacgcgcaacaacatgaccagccgcctgggcggggcgccggcctccacgggcaaatggaacaacgagacgtggctggcgcaggcggaagtgtcccggacggcggactgtgcgggagggtggaggctgacgccgttcgtgaggatggaattcacgcacggccggcaggacgccttccgggaacagggagggtatggccgtgacttcggaggggcggcgctgaaacgcctgtccattcccgtgggcctggaaataggcaggacggacgaatggaaggggaggccgtgggcgcagtcgctgcgcgtgtcctatgtgggggacgtgctgagggacgtaccggaagcgacggtgtatagcccgtacagcgacatgggctggagaggaagggcggtgagcccggaacggcacggcctgcgcgcggagtacaacacgtccctgcagtgcaatgagcgctggagcgtgtacgggggctacgggctggaagtgaggggaagctcctgctaccaccgcgtgaacgcaggggtgtcccggagtttctaaaagaaagcttcaggaaacggaatgaaaaataatgatattattattcgatgaatctgcacaaaaaactggcatttgccgtcatggccctggccattccttcatcatgggcggatatcccggaatcctccgtatcctctgcggccgtctttgccgttaaaaaagcctggcccagggccggcttcattgaatgggagctcagcggatcaggaaaactttatgaagctgaattcaacatcaacggttttgaatttgacgtcaaagttgaccctgaaggaaagatactcctggtcaaggaggaaatagcggtatcggcccttccggggccggtccgcgcggccgctctgaaaccatacccgggcggcagaatcaaagaagcggaaaaagtgacggaaggaagcgtcatccgttacaaggtggaagtggtggatcatctggatgattacgatgtcctgctgactccggagggcgatattctttacgtggaccattaaacggtttgaaccgtctacagccggaaacaggcgccgccctgccaggtaaaaaccctggcagggcggcgttcttccttttcggaatatccagtcgtcccgcggggctggatgatgcctgtttttccattgccccccggcgcggcgcatgcgctcaagcggaggtgaaggccaggcggcccggacagttccggattgagcgtcccggggatgtttcctccgccgtacggcgcgggattattccctgccgcgggcgttcaggaaaatgaacacgtaatacagcagcatggccagggaggaaagcgctcctaccacgtaagtcatggcggcccagaacagggcgctcttggcctttccatggtcgaaatagttcatcaggtgggagcggtccagccatttcagggccctggcggaggcgtcaaattccacgggaagcgtgatgaacgcgaaggctgtggtcacggcaaacaggccgatgcccagccccagcacccacggagagccgcccatggccagcagcacaatgccgatcatcagcacaatgcccaccaggttggaggagagctggacgatgggaaccagcgcggaccgcaagcccagccagtggtaagcctgggcgtgctgcacggcatgccctacttcatgggcggcgacggcagcggcggcaatgctgttggaattgtaaacggactcgctcaggttgacggttttgtccgccggattgtaatggtccgtcagatggccgggcgtggaaatcaccttcacgtccgtaatatggttgtccttcagcatctgctccgccacctgcctccctgttacgggaatggaaatctgggagtattcgctgaagcggctcttcatgcgcgcgctgaccagccagctcagaagcatggagcccagcagaatcaaccagtaaatggtataggaatgcgttggggcggtttccgccgtctgtaccgtataagaaaggagatcgatattgaataactcaatcattgcaaatttgaccttatatcatcaggctttgttgaatccagagggtgccgtgtcagcctccggagggagtcccccggcttctgtcatacggaaatgtgcggaaaaacggagaattcaatcatccgttttttgggagaggagcttgccgtccggcgaataataaagctccactttgcgcacggcgggggattcggaccggcagtccacccggtacttcaggactccccgggcggtaatctgcctggcgcggcggagggcataccccgggaaatcgcgggcgatggccgccgtaacgggggctggaagatgctggagggaaatatccgccttaaccaggctgacagtgccgtcgggatacaatttcacctcgtattccagtccattgaggtggaattcggcttcatagacatcttcgtcattgtcgaaatcccattcaatggcgcctgcgttcggatactgcttctgtacctgctctttcacgggggcgggaacgcgggaggccgggatatccgccagggcgggcaaagtgaatgccgcggcaagagtagctgtaagggtgcgtgaaatattcataaatacggaataattgtatttattaaaaaaacaagaatcttttgcggatgttttgtgacaatttagccatcaatgaaatgaatccgggcatggcggggtttcttgtcgccaaaaagcggatggtggagttgaatggcggcatgcaacagggtattgtctatttgcttggagcgggtcccggcgaccccggcctgataaccgtccgcgggcgggaactggtgggaatggcggaagtgctggtatatgatgcgctgagttcggcggaaatgctgaactgggctcctgctgcatgcgaaaggatttttgtgggcaagcgggcttcccgccacgccctgccgcaggaggaaatcaacgccctgctggtcaggctgggccgtgccgggaaaaaagtggtgcgcctgaaagggggcgacccctacgtcttcgggcgcgggggggaggaggcggacgccctgcatgaagcgggcatcccttttgaagttgttccgggcgttacttccgccattgcggggcctgcctacgcaggcattccggtgacgcaccgcgggtactgcacgcagtttaccgtatttacgggccatgaaggcgagaacaagaaggcgtcttccctggatttgaggggaatagccgaggcgcagggcacgaaagtcatgctgatgggaatgcggaaactggcggatgtatgcgaagccctgatcgggtacgggcaggaaccgtctgtgcctgccgccgccgtccagtgggccaccacgggcattcagcgcacggttacgggaactgtgaaaacactgcccgccagggtgcagaaggccgggttgggcgctcccgcagtagttgtcatcggggatgtggtgaaagaacgcgagtccctgaactggtttgaaaaactgcccctgttcggcaagcgcatcgtggtgacgcgcacccgtgcccaggccggggaattgagcgcgcgcctgcgccgcctgggggcggaagtgctggagatgcctgtcatacgcattgccccgccctccaacaggagggaatttgcggaaagcgtggtgcatgcccacacatatgactggctggtgttttccagccccaacggggtggaacgcttcttccaggcgttttttgccgtgtacagggacatccggagcattggaggagccaggattgcggccatcgggccagggacggaggcgaagctccgggaatacgggctggccgtggatgtcatgcctaaaaagtttgtggcggagggcctcgttaaagcgttcagggacgcacgcgaagaaataggaaccattgaacacagcacattcctgtgggtgcgcggagaagaagcgcgccgcgtgatttacgacgggttgaatgcgctgggcgccattgtggacgaatgcatcgcctacaaaacggaagcggaaacggaggatgtggcgggagcccaggcggctttccgcgaacgcggagcggacatcgtgacgttcaccagttcctccacggcggagaactttttcaagctggggcttccgtggccggagggatgcagggccgccagcatcggtccggtaaccacggcaaccctcaaggagctggggcatgccccttcaattacagcgaaaacacacgatatcaacggtctggtggaagccatcgtcaaggccgccggcaaatagggaaaacggcgcggacggcgtgaaacgccgggccgggcagatgggaaatacaaggcggggaacgccgtttaaaagccattgacggcttcccagccgatgaccttcccgtcttcaaacaggacattgcaggagacgggcgggcggctgcccaggggcatcgtgacgcctatcccggtgcctatgctggaatccctgccccggaatcctcctccgcccaggcccagggaccagcccgtgccgctccgcgtgtaaatccaccgttccgtatttttcccgttcatcctgcccgccattttctgttcgggttcccccccatgccagcagaaccgccatgggagacattcctttttccagttccccgcgcgccactttggcctgatgctccttcgggagctgttcataagccggcatattcttcgcaatgcggtcggacggtgtaggggagcaggctgccagcagcatgaggcaggaaggaagaaggacgaaagaaaaaccagttttcatcatcccgtaaatagcacggcagcggatggctggcaaggtggcagagcggcttttcggaaaaatggagatgagggaatccgttattttgacataaaagcgcgcttttcccgtaaatacataattggttattgacaagcatggggggtaggggagtaggaattcagctccaaatgcaacgcccccttccccgtgcgggcagcgtcgcttttattgttcagcacttttttccgagccgccgatatgtccaaaacgttaattatagcagaaaagccgagcgtcgccactgatttggcgagagtgctcggcaaagagcttggaaaattcacccgggacaagtccggggcattttaccagaatgaccgggccattatcacctctgccgtggggcatttgctggaacagaaaaaacccatgacggaagaaggaaagtccctgccgtggaaattcgactatctgcccgtcatccccaggaagtttgaactggaacccatcaagcagtcggaagaccgtttgaaaaaggttcttcagcttgccagaagcaaggacgttacggaaattgtcaacgcatgcgatgccgggcgtgaaggggagctgatctttcacaatctggtgcgttacggaaaatggaccaagcctacgcggcgcttatggatgcagtccatgacggatgaggccatcctcaacgcatggcatggcatgcgcagcgaagctgacatgaagcccctgacgaatgccgccgtatgccgttccgaatcagactggctggtgggactgaacagcacccgcgccctgactatcctgcaatcccgcggcggcttcaacgtcacccccgccgggcgcgtgcagacgcccactctggctattctgacgcagagggaattggaaatccaggcgtttgaaccggagccttattcggaagtatgggccgaattcgacgttcagtccggctcttactccggccgctggattgaccgtgactggaagaaaaacgatcatccccactcccgcgcggaacgcatctgggattcggaacaggcggccgtcatccgcgaccgctgccgcggcaaatccggcacggtgacggaagaaaagaaaccggtcacgacggttgccccgctgttgtatgacctgacttcccttcagcgggaagccgccaaccgctacggcttttccgccaagcgcacgctgcagctggcccaggaatgctatgaaaagcacaaggtgctcacttatcctcgtacggactcccgttatctgccggaagattatctgggcaaggtttacggcatcgtaggcacggtggcggagcagaacccggaattcgccccctttgccagggacattctggacaacaagcgcatcaagcccaaccggcgcgtgtttgatacaaaaaaggtgagcgaccactttgccatcatcccgaccgggaagatggagaagcttaccggggacgtgcagaaactctttgaaatggtcatggcccgtttcctggccgtcttcttccccgctgccgtgtttgaagacacgcggagaaccacgctcattacccaccaggacggcgtgacggacgctttcctgaccacgggccgggtgcttgtggagccgggctggcaggccgtttacggacggaaggccggcacttcctccaaggaagaactggtgcccgtccgcgacggggagcaggccgccttgcgtgagattgaaatccgcaacgccatgaccaagccgcccgcccggtacaacgaagccacgctgctggccgccatggagggggcaggaaaactggtgcatgacgaagaactggccgccgccatgagcgaacgcggcctgggcactcccgccacccgcgcctccatcattgaagggctgatttcccaggaatacatcgtccgggacggccgcgaacttctggcgacgcgccgcgggattgaactgattgccctgctggaacgcatcggcctgaaaacgctcacctcccccagcctgaccggggaatgggaatacaagctcaagcagatggaacaggccgccctgccgagggattccttcatggagggcattaagaccctgaccggggaaatcgtgaagagggtgaaggatttccgggaagcccagcagcaggtggaactgccggaaatggaattggactgcccttcctgccatgcccacggcctgaaaaacacgctggacgccgtttcctgccgttcctgcaagttcagcatccgcaaagttatctccggccgcgacatggcggatgaagaattgaagacccttattgtggacggcaggacgggaattctccacggatttacctcccggttcggcaagccctttgaggcggggctggaactcaacgacaaattccgggccacgctttacttcccggcgcgggaggaagatgaagccgcaggggtggaggaagccgtgaaagtggcttccgtcgccattccggacatgggagagcatgatgtgatggaaacggccaaggcctggaaaattccttccctgacccttggaaaggaacatgccgccgtctccgtttcccggactatcctgggacgtgaaatcccgctggaccaggtattgaagattttggcggaaggaaaatccgatctgatgaaggggttcatttcgcagcgtaccaagcgtccgtttgacgcttatctggtcttcaatgcaaagacggggaaaataggttttgaattcccgccgcgggaaaggaaatatcccgctaaaaacgctgccggaaaaacggaaggcaaggcggagaagacgggccggaacgccgccaaaactgccgggaaagactccaaatccgggggggctgccaaaaaggggcgcaagcaataacggcagcggaaacattccgccgggaacgaagattgggaaaagagcagggaaaaagcttcttcccggctgttcccgtatgttagcttgaaagcgcacccctggattcctgacgatgaaatgccttttatttgctgtgctggcgtggtgcggcgcggtttgtgcgccggcggaggaatatgcctttccgggggaacgggaatggatttccaaatttggagatgtggtgaagggcagtttccattcctgcacaggggccggggcagttctgaaaatagggcgaaggcatgtggaaattccgttaacccgtctggatgaggaagacgctgcgcttgcggcttctctgacgggagcggaggcgcgccggaacctgaaactggccgcgatgctttggcctttcctgatgaaggaactgcagaaggtgacgtggacgccggcagaaaagaatatctcgccccggtatcatgaaatggcccggaagaagaatgccggagctttaacgggaaccagaaaagtggatggactggtttgtgccacatcgctttccatcattcaggggcctccgttccgtatccgggaatacttccgtccgcaggcgcgtccggaaagcggcagggggcagaagaatttcgatgtggttctggagcaggggagccgctgcgcttattatgatatggataagggtgttcttattccctccaaatgcctgtctgaggaacggacggaaatgcgcgctcccgtttcctctctgcttcctccggcagaacagcttgccgcgagagaatcaaaaaattacaggaatgcggattactccctgcttgtggaaaaccgccccgtcaagggagcctatgaaacgtgcaagcccaattccctgggaagaaaaaagctggtcatgtactggaatacggagggtgaaatggtttgcggcgtcatgaagctggactacgacaacatgcgcgtggccgcgttattcgatggacggcggaagctgatgaacgcccctgggcttggatatgccgtgattctttcccggctggataaaaaaggcaggggcttgaaggagaaaggccgttactaccatgtggcgctggctgcagacggcctgcccgtgtattatcatgaggacccggaagatgaggccgccatgaacccgctgctttacgggaaactacgcgattccgagaaaaaggcggctctggcggaggagaaaagacgtgaacaggcattccgggccaggcgggaagcccggcggcgcctggtggaatccgccaggaagcgtaatacctgaaaatagttcctgtcttttcgcgacgggtatccttcttttctggagagcgttcgtgaatgttcttctcaggagcgctgccctggcgtatttccggattttccagtctttcagaaaggctgattatttattcctgccggggaatttttcagaactatccgaaataattaaaaaacgctgttgttatccgttatctgagagttccacggtgcggaacaaacccatcacacggattcggctggctctttttccagcggtttgtgatcttctatcaatcttttgatatcttttcttgtttttttatctctcgattttcctagctttctgtaaatatcggtcatgtcaaagtagattaatttttcctgaccctgatcatttctaatagaaataatctgaatatatttgccatcatgcatggtatatatgtaccctagtatgccatatccctcatagtgtttcctgatatattccttctgagattccctgatatcgtctgttttcttgattcctgtaagaataataggattgatgattgaattttccctgtcaattttctgactgccgggaattacatcctccgaaccggcggcattattaatgcaaaaacagggaaagcaggctatcgacaaaaaggcaattttcagtaatggtttcatatcagtttatttattaatcagttttatttatttatgttgtcattgcagccgacgcaggtgcagcctacttcgttgcagttgccgcattgcaaaccgcattcttctgtcaaacgcagccgggccattgcgatgactgtgctttctccttctgcatatgcctcggctttgccctctttttcatcatctgtaccggttactaccggggtaattgtctttcgcagcggtattggcccccctgtctcacccgtgtgatgaacacttgtatacttacaggatatatagactgtgtaagtgcgtttggcgttggctaccctgactggctctatgtttaaattttttaattcgtattcacattttaattcctttgcattcccataattgcaaataacaaaggccaaaatgcccaataactgcaatatctttttcatcctaaaattatgggacaattttgatatatgtaaacatatttttaatatgttttatataatgattgattgatagatagttacaaaaatatctaacaaaataatgattatccgggaaagaccccggggaggatgaggcgctgaataggagtgtccggcgttccaacggagaaacaacgccttcgcatctcgggagaagttgaaaatgcccggattggctttaattccgcccgaaggcgtggattttaccgggggcatgccgccatgctgcggcgttcagcaaaggcacagttgagctgcggaccctttatatttatccgccatacgggataaaatgggagattctggtatgccgaggggccgggattccactaaaatgccatgtttctggcatgaggaggctgttttctctggagcctttcagtttgagttcctgctggttttccatgaacatggtgccggattgttccctcaatgcttccatatggcgggtaagaaactgctggcttcgatggtccgcatctgagcatcctgtgaaagcgcttcatggttttcaagtttccctgttgatgttgagtctcccgcagtctttttcgatccatccggagaggatgggaccggtgaatcggattcaggtcaaataacctgttccggggtggttcaggaggcatcaaaagctttcagcactatttcttattcccggtccgtgttccggattttgatgttgatgaagattgttcccggacgggtgttatttgccgtcttttacggccgtgtacattagccgtatcaatggaggcggatcctgctttccgcgagccggaaatgcggtgaattcccggtgttcagccaatgcatattttcagggaaagaagtgattcctgttctttcctgaaacatttcctgccttctttatgccggaagcggcaaaggggcgtgcggcatatgcggcagtattatcttcctgcctggaggcagcggtagtaataatccacgcgggaaatgaaccagctccatttgtacccggggcgcccattagtcatcagcggggcggggcaattcttgccggaccagtagttgtgaggcactacgttgcgcagggggacgttgtagcgcatcatcagcagcgccgccagcttggccgtcttgttgtagatgacgacagggttatgcgtggtgcattcacacatttcaatggctacggagtattggtctcccggtccggaatggtccgcatggtggccggtttccgtagtggggatgtgctggtaggcgccgaattggtccacagtaaagtgccagttcagactgcgggatttgccgctgttcaggtaacgggagtgggcattggcgtctcctttggggttggcggtgctgtggatggtgatgaagcgggggcgcatggaggatgcgcgcttgcgggcatacgtgtttttgggcatgtaggaaactttaatgcctacttcacggcccatctggccgggtgtgcggggaactaccggcgccttttgaattttaaaggagacggccggcggcctcattttgtcgttctgcgaacagctgcagaacgtcagggcggcgaatacggtaaaaaagcccgtccagacaaatctatattccatgcgtttgttctaggaacagcctggaaggattgcaagaagaatttggaattagttcggatgaactaatcaggccgtgccgtgaagttgcaggtatatccggtgcggatgaggcggacgggccgcgccttcgggaggaaggggcccgtccgcgaggggaagccgtaccgggaacgcccggcacatatcccgttatctgaggatttgggtaaggacatattgcaggatgccgcccgccagatagtattctttttcaataggcgtatcaatgcggacgatgacaggcacgtcaaatgcttccgcatccgcgggctgtacgcgcagggtgacctgctggcgcggagcgatgccgttgttcaggcccaggatggagaaggtggcgtccttcaacggagtgatgcggtcataatccgccttgtcggcgaagttgaggggcaggacgcccatgccgataaggttggagcggtggatacgctcaaaactcttggtgatgacggctttgacgcccagcaaattcgtgcccttggccgcccagtcgcgggaagaacccatgccgtagtcttctccgccgatgacgatgagcggaacgccgtcctgagcgtaggccatggccgcatcatagatgaaggcgggcgttcccgcggcagggattatttccttgtccggggcgggaacggcgcggttgccgaaatacagcgtgtaaccgccttccgtgccgtttaccatcaggtttttaatgcggacattggcgaaggtgccgcgggtcatcacgcggtcatttccgcggcgggagccgaaggagttgaaatcttttctgtccactcccatgccctgcaggtacagccctgcgggccctgtttcccggatggctccggcaggggagatgtggtccgtggttacggaatcgccgaaaatgcccagggggcgggcatccgtgatatccgccagtgtgcggggctggccgttgaagccgctgaagaaaggagggtcctgaatgtaggtggattgttcattccactggaagacagagccttccggcgcgtatacggccgcccagcggggattcctgtccggcgtgatggtgtaaagctcccggtatgcttccgggttgcgggatttggcaacggcttccgcaatttccccggagctgggccagatgtccttcagaaatacggggttcccgctgcggtccgtgcccaacggttccgtctggaagtcgatgtccacgcggccggccagcgcaaaggcgacgaccaggggaggggacatcaggaagttggtcttgatggaggcatggatgcgggcttcaaagttgcggttgccggacaggacggaagccgctacaatgtcattgtcccggacggcctgttccagttccggatttaacggcccggagttgccgatgcaggtggtgcagccgtagccgacggtttcaaagcccagagcgtccagggattcctggaggctgttggttgcaaagtaatcggaggcgatacgggaacccggagcaatggacgttttcacgtgcggaggcacgttcagcccccgttcaaccgcttttttggcgagcagcccggcggcaagcatcagtcccgggttggatgtgttggtgcaggaggtgatggcggcgatgaggatgctgccgtctttcagcttcgcttcctggctgaagccgtccaccggaacggggacgcccgccggggagtgcatggaaaccgtgacctccggagattccttcttgccgtaacctccttccgccacgggcatgctgacaagcttgcggaagctgtccctgatggagttcaggcgaatgtggtcctgcgggcgtctggggccggagacggctggttccacggcagacaggtccagttccagctggtccgtgtagtccagatctccgttacggggcattccccacaggttctgtgccttgaagtagttttcgtacgtagtgatggcttcttcgctcctgcctgtctggcgcagatagtcggagcagcgttcatccatggggaagaagcccatggtggcgccgtattccggggccatgtttgctacggtagcccggtctgccagaggcagggccgccgccccgtctccgaagaattccacaaatttgcctacgacgccgtggctgcgcagcatctgggtgacatgcagcgccaggtccgtggcggtcactccttcgcggagttctcccgtcatatggacgcccactacttccggcaccaggaacgtgacgggctggccgagcatcccggcttccgcctcaatgccgccaacaccccagcccacaacgcctatgccgttaatcatcgtggtatgggaatccgttcccaccagggtatccgggaagtaaacgccatccttttccatcacgccctgcgccaggtattccagattgacctggtggacaatgcccacggacggaggaaccacggaaaaagtctgaaaggcctgctggccccatttgaggaattcgtagcgttccgcattgcgctggaattcaatgtccaggttcttttccagagcatccgtgcatcctgcccagtccacctggacggagtggtccaccaccaggtccacggggaccagaggttcaatgacggaggcgtcttttcccaatcctgctacggcggagcgcatggccgccaggtccaccagaagagggacgcccgtcaggtcctgcaggacaatgcgggctaccgtaaacgggatttcataggaaccgggattgttggcattccaggaggccaggttgtccacgtccttttcagtcactttcaggccgtcgcaattgcggagcagggattccagaacgatccggatggaaacgggaaggcggttcaggcggggatagccgttttccgccagggctggcagtgaataaaactgtcccggggttccggttcccgtggtgaacgtactcttggcaatcttggtcatgatgcggaatagagggttaactgtaaacaggcggctgccctcctggcagtcgcgggtactatacaggccaaatgtgataaggcaaggactctgtgtgacggagggcggatttttcccccccttccgaagccggggaaatttttctctgaaccggggctgccgctttttccggcattttttctccatgcacgccgcaggaatcatggagtgcgtcatggaacattgaaaatgagtccgcagtattgtccaaccctgtgaaaggtttcaagatgatgaacgcaaaaaacatcttatcaatcatagcgggagcgttggcgctggctgcctgttctggcccgcaggaagagaatttgcgcatggttcccctgaccgtgcctgcaaccgtacccatgacctcctacggaccgcacgcgagggtggttgtagcaggaattgattatacggaggtgcacgacgaatggatgaatcccgatatcatgaaaaaggccaccccgggcaatacgcgcgtggtgatcagccgcggacgccaaaggggccagttgatggtgggggatgaggtagccatggattttcccgtttgcgtgggtaaggcttcccaccgcacgcccgtgggccatttccgcattacggaaaaggcagtgcatcatgtttccaatttgtatgatgcctccatgccttacttcatgcggctgacggacagcggcattgggatgcacgtaggccctgttttccagacgccgcagtcccatgggtgcattcgcatgacccgttcttcctgcgtgccgcttttcaaaaccgttaaggtaggcacgcccgttacgattgtacagtaatgcccggaaaatttccgggcgcttttccggaagaaaaattccccgcgttttttaaaaactcatttttttaaacaaaaaaacgtcatccgccgctattttaataaacggcatgtagataaacggtacttgccgcaagtcgcattgcctcagcaacccgaaccctccatgccgctgccgactgtatagtattcattcatcggtagcggcatggagggaagccgtctgcttgaccgcagaacttggggaatgaacgggctgcccgtatttcgtgaagaggacatggtgcttgttctcccggggccgcatttgttcctccgtgttgtaaaagattaatggagaagaaggattggcctcccctgctttttctccggattatttttccgcagctttcctgtctgttccttcccggtgcagcaggggaaggtattttccataaccctgtgcttccatgtcctgttcaggaatgaatttcagggaggcgctgttgatgcagtagcgcagtccgccctgttccttcgggccgtctgtgaaaacgtggcccaggtgggcgtctcccgttttgctgcggacttccgtgcgcctcataccgtgggagaaatcctgtttttcctgaatcagttcttctttgatggggcgggagaagctgggccagccgcagcctgaatcaaacttgtccgtggacaggaataaaggttcgcctgtcgtgacgtccacataaatgccgggtctgtcgttattgaaatattcattgcggaagggaggttccgtcgcgttattccgcgtgacggcaaattgctcgcgtgtcaggacgcggcgcagctcttcgtccgattttttccggtaaacaggttcgttttcgcgggcctgggacgcttcccggaatttggcgggtggaatatggcagtatccgccagggtttttatccagatagcgctgatgatatttttccgcccgtgaaaattggcggaggggctgaacttcaattgccagaggctgcctgaagtgctgctggagccttttcagggacgtttctataacaggtttgtccttctcatccgcgtaataaatgcccgtgcggtattgaattcccctgtcgtttccctgtttgttgacggaaacaggatcaataatggagtaataccgttccagaagaaagggcagactgagttcttccgggtcaaatactacttttaccgtttccgcatggcccgttttcccgctgcatacttcttcatacgtgggagaagccgtggagccgttggcatatcccacttccgtttccttaacgccgggcatcagggagaagtatttttccactccccagaaacagcctcccgccaggtaaatcgtttttaaatccttgttgtccatatgaggtttgtcattactgcttgcctggcctttttccccgcaggaaaaaaaggagagcatggcgactgcggccaaaatggcgcatgccagtccggccagtgtccatggtccgtggtaaatacgcttcataaacgctgtatggagtcgccttccggtgcgggagcagcggctccctgggccgggcaactgctgtcccccggcttttccggaaaggtaaatgattagacaacagcgggttcattccgttcgatacctgtgtccatatttccttatttctcccgtttttccgccttcatcctgtttttcagccactggtaaatagcccggtcggaggcgtccggttttctgcttgtctgcatgctgaatccgtatttggttcggaagttgaaaacggccagagaagggctcaggccgatggaaagcccctccatccgtatttccacctcttgcgggacatggctggagaagtcgaggcgtccggcattggtgacggtttccacatagtgtttcaggaaaggctggatgctggccaggaaggagggttccagagccatgcggcagcgttccggggaagaattttccctgacaagaatggcggaaggagctgcgatggcgtgggcgggccttaacgtattcagcggaacattccataaaaaggaaaacagccccgtgcccaggagaaaaagaaggacggccagagcgccaagccatttgacccgtttgtttactgattgatgacagggccggccttcgttcatggagagaagcatggcataatattccatggtgatccatgaaagaatttgccaggaagcagatgggaattcccgtccccgcatgagggaatttttgtactataacatgaaaagcatgaaaaaaaacgctggaaatcatgtatagtatcattaaatattaatgtagtgtatgagaaaagattccatttttctttccatttttttatttttcctttttctgacaatctccataaataaatccctcgcggcaaaatatccttcgctggatgttccgaaagacattttgctccacgtgaaagaagctgcttcctcccagtccccctattccggcaatcattctgtaaagcaggctgtggacggctctatggaatccgccaactggcatgttcccggagtgcatcatgtggagggggaatttgtgtttgaagtgccggagaccattcattacatcattttttccggagccgatttcaatgaaattgccgtgtccgccatgtccggctcgtcttggaaggaccttggaaaattcgatatcggcggctccaggatgatcagatttaaaaagcctcttcaaaaggttcggaaaatcagattgacggttgattatcccgaaggttcctctccgtcttttaccgtacgggaaatcagcttttacaaaagggtggagtccgtacttaaccggaaattgctgaaagtatttaaggacacgagctgctcctccatcaatcccaggtgtaccttgacggacctcaaggctcttccggagtttttgcagatgattgcgaagaaaataaaatccggcgattatgaagacaaagaattccgcattgcttcctataaggcttacagccatccggagtttgctgcgaaggtgagaaatatcaacgccctgaacaaatttgacaatcctaccggaattgtcgcggagaaaggagatgaaattcttgtgttcgtaggacctacccatggagaagatattgggctggcctccgtttctccagcgggaatagagtcttcctcctatcctttgaacgaaggggtaaacaaaattagaatcaaccgttcgggattgctttacgtgatgtatcacaccgatatcagcacgcccaagaagccgataacggtgcatattcctgtgggaagcggcatagtgaatggatattttgacgtgacgaggcacacggataaggactggaagcgtatgatcagcaacgccccgcatagcatgttcgatatcgttgggcggaattccatgatgattcttcacacaaagtacctgaaagattacagtccggattccattacgaaatccgtcagggtatgggatgaaagcgtcaaggccatgtggaaaatcatgggatttgacaagtatccccagccgcacaataaccggcagcttggcgtttccgtagaaggaggagcccatatgtttgcaacctggtattactgcggctacagtattggagatcagggaaatacgctgaaaaatgaagtgctcgctcctggagttcttcagggaaaccgcctttggggaatcgggcatgaaatcggtcattgctaccagcatccgttcaactggcgcagcatgtcggaaagttccaacaatttttttgcccagctgattctggaccaggtgaccaatgccattaatggcaatgagcaggcctccgatatggaaaacccgtgcaaatacctgctttcagaagcggtaaagggcatgccgttccatgatttgaacggctgggccaaatggggttttgctcaatattccttttatctgtatttccataagctgggaatcaatcccgaattttatcctaggctgtttgaatcattgcggcgcaagccgctttccaggcaggcgtatgaggtttccgaagcccatttggccttgtatgaacgcatttgcaatatcagcaggacggactttaccgatgactttgaaatttttaattggtttgtcccgattgaccgcaaggggcatcaatatggggattacagttttaaaatgacagaggaaatggcccgggcatccaaggcccgcattgccgccaaacggtaccccaaaccgaaattccgcattgccttcctgcatcagcatggaaagacggtcaatttgtgggggcagaatctgcatgggtcccagctcaacggctattggaccaaatacaagcagaacgcaaaactcagcccgtctgtaagcgcctccaaaaaggataacatgattattgtgcggaatggggaaaatgcagccgctttctgtgtagtgaccaatggaaaggtggtaggttattatgaccgtcagaagtttgacgtttccggcgtggaatggaatgatacctctaaagtgtacgccatcccgattcagacggcggaaccttataagttgatttatgctgccgggcgttcctgaccgtgttttgaaggtttgggaaaagcctcccggaaaatcatattccgggaggggcgggtattgggccgcctgctattcgggtgccttgaagttatatacgggcctgatgcgttccacgatttccgccgtttcatggatgttgtccagcacgctctcgccatccttgtaggccattggcgcttcatccagcgtagcgcgggaaacgcaggtggagaaaataccctgcatggaagcctcgaattcctccagggaaagattggctttagcctttttgcgggacatgctgcggcctgcgccgtgcggagatgaggaattgaattcttcatttcctttgccgatgcagatgacggagccgtcacgcatattcaggggaacgatgagtttttctccgcgtccggcccggacggctcccttgcggatgatttggtcttccgcaatgtagttgtgcacggtgtcgaaactttccagatcatctgcatcatccagcagttcatgcagtatcacgcggcggttcagggctgcgaagcgctgagccaccttcatatcccgcatgtagttcagcgtattttctccctgaaggtagcagagtccttttttgcgttctttaagataggcgtccggacaagtatccacggcgattttctggtagcgttccgcaatcttcagaccgaaattgcgggaaccggagtggatgcacaggaaagcgtgctctttcccttgcgctatttcaatgaagtggttgcctcctcccagagaccctacggagcggcggtgcctgtctttgtccgttctcagcacgtccatgcagatgcgggagatttcttcatccagttccgggtcgtccagcaaggcttgatgaacggagggacgggcatgcatcccggacgggacgcgctcgcgcaggcgtgcgtcaaagctggaaaaatccggcagtccggacagtctggcggtaagcactccgcagccgatatccacgccgatcaggttgggaattaccttatccgttttcaattccgccgtgaacccgatgacgcagccggctccggcgtgcacgtccggcatgatgcgcacccggcttccttcaaaggcggggtggttgcagacgtccctgatctgggtgcgggccaggtcttccagttcatccgtgaacacgcgggcttccgtgtattttccgtcaatggtgatcatggttttattcttttggttgaggggcgcggagatatgcggaaagcgccttcgcgccctgtgaccttgtcaccataacgcatttgttgactcttgcattatataagtattcatattatataactataaagttatgtttgagcatcttttcgcagaacggggactgtccctggaccgattgaaaaccttgatagaagtggccaaggccgggagcattgccgctgccgcccggggggatagtgcgcggcagagcctgtattcccggcagattaaggaattggaggaattcttcggtgtggaactggcgagccgccgcgggaaagtgctggctcttaccggagccgggtgggagctggtgaggctggccagtgaaagcctgtgcctgctggatgattttaaaagccggagccggaatctgccctaccggttcactatcggagccggggacagcctgcatgcttgggtggtggctcccgtgctggcgagtatccagaaacgggggctgccgtggcttttcgcgctggagaacctccgcaacagtgagattccctctaagctccagaatatggatatagacttcggtattgtgcgtaccagcgcgctggaggcggaagggttggaaagccgggtcatttgctccatggattatgcgctgtacgttcctgcagccctggccgggaaaaaggcgcgggggaagaaggaggattttctccgcctgctggaaatgttccccctagcaacgctggggagcggttccgggtttcatgcgttgctgaaaaggaattgcgctgagttcggcatcaggctgcgggtgcactgtgaaacgcaatcttttccttttgcggcccgcatgttgaagagcggagcgttcatggcaatcctgccctgcatggcggaaaaagaactgggggaagggtttgtcaaggttactcatccggcgctggacgggctgtcccgcagtatttccctggcctggaatccgcggttgctgcgcgtgaggccttcagccaaacgggtaattgatgttttttccatcccggaacgggagtgatggaaggaaaatcaatcagaatccacgcccaatttatttttacggtagtggtccagggagatgcggtaaaaatatacgatcgccagcaaattcagcagggctcccgttccgaaggcccagttcaggttcaggtacgcgtaaattttgcctcccaggaacatgcctgttcccaccccgatgtcaaaagcggtgaaaaatgtggaattgacggctccccggtggccgcggtccgccatgttcagtttcatggtttggaacgtggggatgaaaatgccgaagccaaagccgatgaggatggcggaagcgtaatagatccattccagcggcgccagcgccagtgcgccgaaactgacggtcaggatactcagggagatgacggaaagctccgccacgcgtccgcggtcgatttgcctgcctaccatgaacctagagaccagcatgcccagccccatcagcgcgtaaaacagcccggcgtatttgaacccgtgcatttctccgtacagggcggaatacacggccaccacgccataggagaaggtggcgatcatcacgttcaccgccagcggaatgcccacgcgcagcaccagacggtccagtacctttttaggcgtttcatacacgggctcctgaacagggctcccgggaacgcggatgagagatgcaatgcccgccccggccaggcacaggagcagggaactccaggtaatcacgtaaaagccgtactgctggtatacctgaaggccgatgacggggcccaggcacatgcccagcgtcattgtcatgccgaagaagcccaggccttccccgcggcgggcaggggggatgatatctactgccattgtcgggccggaggtggtcatgcctccccagatcaggccctgtatgaagcgcgtcaggaaaaacgccagggcggtggcggccgcagcataccctgaaaaggacagggccagcataatgtaaaccgtgatgtaaatcttcttgcggtctccggtatccacccggtgtgcgaaccaggggcgggagataatggcggccagaacataaatggacataatccagcccagccagccggaggagacctgcaattgccccgtcagatacagcgggagaacgggcaccagttcatagaaggccagccccgtcattaagttggcgcagcaggccaggatgtagtctcgcgtccagagaggcgctttgacggatggtgcggtttccgccgccaattcatctctggtccgggtcatgcaggggttgtacagccgttgggaaaagtttcaaacggcctgacgtgtcatgatgatgagcggagggaggaaggccctgatgaatccttgttgggagacgttattcattttcacgggaaaaggttacgcccaccagcgtgtctctcccgtcaatggcattcagatagtcgaatacttctccgcagggtgtttcgttctcaatgaggaaaatgaatgctctgcactggttgatatgttcatttgccatattggagaaagcctgaaggtcgtttttccgggatggaccggatggttttttctggatacgccagtaaacaagctggtagttccctctttccgggtaaggggaccggataaatttcacgatgggataaacgggtttccgggaaggtgttttgctgaaaacaagaaaatcattttcacggaaaggatgttccagaatggcaccgtcgggaaggcagggagtgtccgggttcatgtctttttcagattccggatcagattccggggccatatccgtggagacgggaagatcccagcaaattccatttccaaaggcggacgcgatggcatcccctcttttcaaacggagattattcacgccatgcgcataagcctccgatatgccctcagcgatgcggaaccagggaagggacggattgtccagattgatggtcaggcatctttcacaggccaaatccgtcttccattcctgtatggggccgggcagttccgatgcgttcacgattatttctccgggcagcagggcgcttccctgtttagagcatgcctcaaagaggaagctgatgaagagagggaggaaaacggcgagaagacgaagcatttattcattcttcttatatggtttttattgcatgtcaaaagaatagagagtgcggtacatgccgggaaagatggcgctggctcccgctccggaatatgccttcttttttgcgtgcaggacggcgcgggcatggtagggtacatggtatgagcgtaatcaccaaacgtggagacagcggcgaaacggacctgatgttcggcaggcggagtcccaagacagcgccgcgcattgaagcttacggaacggtggatgaattaaattccctgattggcgtggtgcgccattccggggtaagctcccggacggtggagatgttggacggcgtccaggcgcgcctggtgggagccatgggggaactggccacgatggaggaagatttgcccaaatatgacgccaaggggtacgcccgcattacggcggaagatgtggcatggctggaggaacaggcccatttgctggaaaaggaatgcgacatccgtttcaaaggctgggcccgcccgggcaaggaaggatcgctgggctccgcgtatttggacctggcccgttccgtctgccgccgtgcggaacgccgtgtggtggcgttgaggctggatcatgccctgagcaacgtgaacacggccttgttcctgaaccgcctttccgatctttgctgggtgctggcccgttttgaggcgctggccgcaggagaaaaggcccaggcctgagcaggccgtttccgcccgtcctcctgttccggcatgttgcgtatctgcgtgattcccgtgtcaggagaagcctggaaagaatggttttgccgcagatccatgtccaggtggcaattccccggaatggttcttcgttattttcaggggagggcttcccggtcagtccagcggcaggatggaagtaaccagcattttgaaccgttcccgggcaatgacggaatgaggcactccggcgggaatcaggaggctctttccctggggcagaataacttcttcattgcccacggtgaagtacgccgtcccgtccagaatctgtatcagtgcaggaccgggcgtctggtgagtgggaaggagctgttcgctgtcaaaggccagaatggtcatgttgactcctttggagcgaataagggccagactggtgatttgcccttcgcggtaatcggtcagatcggcgtaattaaagggagtgcgttcggggaggcgctgaatggctgtcatgtaaattggacacccttgttggcccttcccgtttcttcatgacaggcttccgggaaaaaggtccgctccagacccgggagcggaccttggcattcagcattcatatggtgcttacttacggagtcagcgtcctgaattcataggcgtgaggtcggattcacaagtaaacaacagctattctatacatgaaaaatacaatttacttcaagaaaaattgtgtaggataatgcagatttgattctgctgcagggagaatcggatttgactcccgtatgggattgtttccatatacgggcgtatgccgtcagcggttccgccgcccgtggccggatgtgcccttctcctgtttggcggggaaggccgtttttcccgtttgccgcggtttctcccgtgagacgatggcgaaatccgcccactgctgctccctgtccactttcacgggaatgacgggaacgcgcagccccgcgcacagcacggaaccatggtcgttcttccagcggctggcgaacgcctcatacacccagcggccgccgggaagcttgtccggcttgaccagccccttaatctggaggcgcggtatttccagcagcacgccgaagtggcgcgtttccgtaaccagagcttcgtgcacttccggatgctccgtgtagcactggccttccagccattcgaagagtttcatccggttcgcgtccttttccgcgctggcggaaatgcgttccgtctctgaaatgtgttccgcgtcttcctccagcctgcctgcactgcctgctcctttggctcctttgggaggattggccagcaggggattcagggagcggtgaaccaccaggtccgcgtaacggcggatggggctggtgaagtggcagtaattgggagtggccaggccgtagtggcccaggggctccgtgtcgtacctggccctcatcaggcttttcaggagcgccagcttaagcaattgctcgtccggggaacccttgatggacttcatcagttcattcaggtactggcgttgtccgatatcgtggacgggatacccgtacaatttgcacaactggccgaattcaaacagtttggaggaatccggctcttcgtggacacggtagatggtgggacggttcccgtttttcagggccagggccacggcttcgttggcggccagcatgcactcctcaataagctggtggctttcatcgtactcttccgtgatgatgcccgtcacgcggccgtccttgtccataacggctctcacttccgggaagtccagatccagggctcccttggcgtagcggttgcggcgcaggatggaggccagattccaggcttcccgcaccgtggagggaacttcccccttgtcgtttcccttcagcatggcgaaggcctcctgataggtcaggcgcgccttgctgcggatgaaagcgtccgcaaagcgtgcacggagcatcttccccttttgatcaaatttcatttcgcatacttttgtcaggcgcacgacatccggccgcaggctgcacaaatcgtcggaaaggcggggcgggagcattggaaggacgcggtccggcaggtacgtggaattgccgcggcgcagggcttccccatccaacgcgccgccgggcctgacgaaatgggagacatccgcaatgtgaacggccagcgtccagccggacggagtggccgtgatggaaatggcgtcgtcaaaatcccgggcgcttgccgggtcaatggtgatgacggtacggtccgtccagttttcccggcgggcgagttccccgggggaagggttttgaggcagcgtttccagttcccggagcacggaggcgggaaattccgcggaaaggccatattttctgataacggcttccatgtccacgtggggctcgtccggatagccgagcacctccacgattttcccgcgcggggctttcttttcctcaccgcaggttacgggttccacggaaaccagttggccgggaagcacctccatggcgggtttttccgccagttcaatggatgacggagagcttacgccgtctcccagcacgcggcccggcttgttctttccggtgcggaagacgccaagccagcgggagcgcgcgcgttccgtcacttcctccacgcgggctttcatgccggcatccggggaagaaaagcggtccctgcggatattcctccggcccctggccgccttgcgttccacgcgcacggccacccggtccccgtccagggcagtacccagacggttgggtttaagttccagctccggaatggcttccgtgtcccatcccagggccgcagcggcgggatccccttttctggggagaaaaagaatcttgccggagcgcaggatgcggatcatgccatgcaccaggttccggcgttcccgctttaaagcgtatctgcccttttgcagccgcacgagttttccttcctcctccatctggtccaccagggcgcggaaatccagcttctgccgggaatccacgttcagggcgcgggccagttcggatttgctctggggttcgtaacgtccgtcttccatgtgacggatcaggcggtctttaagggaatgattcattttgcggaagttccgggaaaaggtgtctcccattcccatgggaaccatcatagggcgggttgcgcgccgcttcaaggcgcaggcggtgcatgccgcgttcgtcagcggtttttggcctgctgccgggcatgccgttgtgcgggaccgcagtccgtctaggaatttttttaattatgtggcatatggattgacaatgaactgttttttggatttaacgatgtttggttgttttttatgaaaacatttattttccagtttttggcctgctgtttcctggcgttcaacgcgctggcgtccaagggcgttgaaatacggcatgaaacccagttctgcgcggcggaagtatatttcaggtatcccgatcgcaaccctccccaggaggagatagacaaaagcaacagggaaagaacgaccgtcaccctccgggaatacatcaccctgaccgccacgctggacggcaaagagcttcccgagggcacccggtgcgactggtccgccgtggaaggaggggaatattttaaaatcgaagttgacgatgtagatgaaaaaccggggcaagtaactgtcaacatcaataccctggccaaaacgcggcagacgctcaaggtgaaggcggaggtggacggggtggagcaggtggtggaattcaccctcatcccgccccaggggctgatgtacgcgggggcggagagtcctttccggcaggcggaggaagaagcggccaaggtgggatgcaccgcggggctgagcgccctccgcatcctgcgcgtgtatcccttgaacgtcagcttcaccaatctttactccctggagcagcatgccggttatgagcccgaccctcttccggaccatcccctggtcagcgagcatgcgccttcgccggagcccgcacgggtttccgtcaccaatgaagtctatgacagcaccaactgcctgtatccgccggcgctcattgacgcattctcggggtccatcggctggacgtggaagtgccgctggcagatattcggatgtacggatgacccccaaggaggcaggtacacgaaagaaaaagtgctctgggatttcaacacggatcaggttttctccatcaggcgcgatcccgatacgggaacggtgcactaccggatccagaagttcaagggattgaacaaaaatgacccgggcatcgtcaccgcaacaagcaactgattttctttatgaactattacctttccctctgtctttccgtgtttcttttcttttccgtcgggagccgcgcggatgaagccgcgtacggcgaccttccttccttcatgaacatccggcccgaaaggctgagcggggacgcgcggcatctgaaagacctgctggaccaggggaagctgggcgacttttaccagcaggcgctgcccgtgctcaacagggagctgtttgacgaggacggcggaatgaccccggaagagctggaaaacgccctgttcatcaacaacatggtcgtcaaggcctcctatcaggactaccggctggacaacttttccacctgtattaacgaaggtgatttgcgtgctaagtttaaagcgtatggaaatctttccaaaattaaaaaatatgtacgggagaacaagaggctcaggcaagggaaggagctcgcgaggttctgcctggaggcggagttcgaatatatcaggcggatgatgcttcagggcgccgccgtttaccgctacatcgccgggctggaggcggagcacgggaagttccatcccgtgaggccggtcgacacgctgccctactggcgttaccgggagacgaaaaacctcgccgcctgcggtgcggaagaggaacggcgcaggaaggccctgtacgagcggaacgtggacgaactggtccgcctccggcagtccttccgctggtatattaaacacagggagggtgcactgttgaatatcgttctgaagcttcaccccgggaataggggccgcgcgctggaaaggctgagggaatgcggctacaagacggaccgggagctggtggagtttctggagaggaccggcggcatgagaaagagagttcaattcctgtactctcccgggatgctccgggaacacagaaaactcgggaaggaggattagccgccatggccgcgaatatcctgtcggggatggttcccctcagcctttccttcttcctgctcttttctctggggagccgcgcggatgaagccgctgtgtacgacaatttgccctccttcatggacatccggattgaaaggcttagcggggacgcgcggcatctgaaagacctgctggaccaggggaagctgggcgacttttaccagcaggcgctgcccgtgctcaacagggagctgtttgacgaggacggcggaatgaccccggaagagctggaaaacgccctgttcatcaacaacatggtcgtcaaggccccctatcaggactaccggctggacaacttttccatctggatcaacggaagtgagctggaaaccaaatttaaagcatgttgtaatctttccaaaattcaaacctatgtcagggagaacaagaggctcaggcaagggaaggagctcgcgaggttctgcctggaggcggagttcgaatatatcaggcggatgatgcttcagggcgccgccgtttaccgctacatcgccgggctggaggcggagcacgggaagttccatcccgtgaggccggtcgacacgctgccctactggcgttaccgggagacgaaaaacctcgccgcctgcggtgcggaagaggaacggcgcaggaaggccctgtacgagcggaacgtggacgaactggtccgcctccggcagtccttccgctggtatattgagaacagcgagggtgtcctgttgaatatcgttctgaagcttcaccccgggaataggggccgcgcgctggaaaggctgagggaatgcggctacaagacggaccgggagctggtggagtttctggaaaggaccggcggcatgagaaagagagttcaattcctgtactctcccgggatgctccgggaacacagaaaactcgggaagggggattaaccgccatggccgcgaatattctgctgagaatgctgttgtgctgcgtcctgttactggtatctggcgtttcccgggcccgggatgccaccgccgtggagagtttgctgagggcggattattcttcagtcatcattgacggcgtacggaatcaactccggaaacatcttgattccggtactctttcaccggaaaaaatccggcggatagtacatcatccggaattggagcaactgtgccatatcggacaatttttccgttatgccagccaggaaaaggcgttttcaacaagagagctccgggaccggacgtttaccaggtggcttgtctcccatccggaagttttccggaaactggcccatgcagggtatgctcagcagagcagtctggctattctttaccgtctgtggaatagcgcagacagggacttgtgcggagttgaccttaacatcgccctgggggcctgtctcatcgccgatgttttcacggcagaggaatgtatagccaagtatggattttaccatgattcccatcatcatggcaggtgttatccgcaggccgacagccttgaaccgtgggagtgggccgtggttctgagaggaaaagagagtctggaagatctggcatgggcccagcaatttattgaagggaaaaatatcaaacccgagcaggcagggggtaaatttaccggatttattccctaccgtaaaaagaatcacagaggaatcagcatccatgccggggccgcgttttacgataacaagcccatcactcttcagctttatacggaatatggaggcgtgtgcggagccgtttccaagggggccgcgggttttttaagagccaaaggcgtcccggcgtaccccatcgggcagccggggcattgcgcttttatttggaagcaccccaaagggcaatggctgatcggcaacaacattggaggatggaactgggccaatggtggaaataaactgccgtggaaaggccccgtgcagattatctccgccctctgcgctttctggcagggtccccaggcccgtgaatcttccttgatgtacgatttatctttttattcccggaatccgcagcatgtggaactgctgcttcaggaggcgtgccgggccaatccttacaattatccggcctgggcgcgttatttgggcatcaaggcgggaggtgcgggcgataagaagaagctggagtacctcatccagttcagcaaggcgatgccccatgaacataacctgattgattacgtggcgggtcatgttttgaagattaaccctgaaaaggtgaatccctatgaattgtacgcctgcggggtcagcccggacagtacgcccgaagcagaggaacttttcatccggcaattttggaaaaagctgattgccgactgccctgaggttaaactccatgctgtttacaaggaagggactaccggtaatttcttaaatttatggctggaaaaatcaaaaaatgtcaaatggaattccaaaatgaagagcaaaaccagcaaagcttttcaacaggcgttgctggttttgaccggcaaggaaaaaacttgcattaaaatgatgaaaagctaccgccggtttctcatcatgtggaatgatgagaaatatatgatgcaggcgcatgaatttgtgcaggaccatttaaaaggcattaccagcgaccaggtgaaaaaggaaatggccggcatgggtagaaaaatgggtatccttttaaagaatgataaaatattgaacatgtatggtcaaaaccgggaatccgaatagggattgaccattgttcaaagggacattatctgggccggagcgtaccttccgtggtgccgagctgttccgcgacatccagttcccggatgagccgggccgccgtgcaggagccgtccagcaattcccggtagcgggacaccagaaggcgtattttttccgggggatcatccagcagttccagacggaagcgggaaagacccaggcggcggaagccccggaggaagccggctcccgtctgagcgcgtccgttgaacagcgtgttccggcacccggcgtccgccagcaggggatgaagctggcctacgcggtcacgcagctgcacatgatgccgttcgcaggggcgtccgcaattcttataactggtgccgtccgacaggaaggtgcagaacacgcaatgctccatgtgaaacatgggcatatgctgatgcagagtcagttcaaaccattccggcggcgcggcgcggagcaggtccgccacctgttccgcgttcaggtcgtaagagagggtgagatattccagcctcccccgttctttcaggatagccgcgctatacggattggcgacattcagggaaaaatccccaatgcggcgcaggggggaatggcggaagtattgcgccgcgcccaggttgcggatgaggatgccgtccggctccgcccgttccatgagcttaaagtaaccggtttcagacggcttctggatgcggggcgtcgccagaaagacggggatgctgtccgcgtgctgccgaaccgctttcactcccgccgcatagtcccggaggtcttcaaagtccagataaacggcatccgccccggcatccagaacggaaggtatctgttccggtctgcggcacagcacagacaggtgcggaggtgcgtccggagctgccgcccccgccggaagcgcggaaggggtgaaagccgcggaaagacgggagggaacgggggcttccctctcctgccggaccgtttgaatttgttccacgagggcgcgccttgcctggttgaggatgctgagcgggagcatcaacccgttcggcagccggcattcgcaggaagccaggcggaaccccgttcctcccagtctgccaagctgctgtttcagcgcttcaggagtcagcgggcgtttttccgccgtttgcaggggctgtgcggactgcacggaacacccgtattccgggcaggaaaccgtcagaggctccccggcggatccggtgcatgtcaaatggaggggtacggaggcttccggcaggtgttcccgcatttttttcaactccgcgttcagggccggatcatccgttttccagagcttctgccccggcctgaccctgctccagtcaatgcgggatgcttttccatgaaagaaaaggcggtttctctgcactttccagatacgaccgccctgttcttcattgcggtcttcccctgcatcaatgacgaagccgtcaccgggcgcgagcggaatgcctccttccggtctgatatccagccagccctgaccgctgttcatgatgacgcctgcgtaagcgcccctctttttaccgtagcggccgtgggtcagacgcgggtggtccgttccgtccagccagcctgtggagaagccgcgtgaaaataccatttgcagtgcgtagcggtcgcgtacggtcaccatttcatccacaggtattccagcgcaggcggcgtccagggcttttctataggccgccgtcaccgccgcaacgtattccgggcttttcaggcgaccctctatcttatagctttttacgcccatgcggaccaggtccgggatgcggtcaatggcgcacaggtcctgggggctgagcaggtagcgccgttctcccaggggaacggctgtgccgtctacaaccagggaatagggcaggcggcaggcctgcgcgcattcccccctgttggcgctgcgctggcccaggctttccgatgtaaggcactggccggagtaggccacgcagagcgccccgtgaacaaatacttccaggggtatgcccgtatgccgtacgcattgcccgatttccttcaggctcagttcccgggccaggacggcctgcttcaggtccaggaatccggaggcgaattccagcccgtccggagaggaaagcgtcatctgggtggaggcgtgcagttccagcttcatgccgggaacctgccttccccattccgtcaggcagcgggcaagtccgatgtcctgcacgatgaccccgtccgcgccggcggcattcaggtggcccaggtaggagagggcgtccgccagctcggaggtgaaaatgagcgtattcatggtcacgtaccccttcacgccgtgcgcgtgaaggaaacgcatcagttccggaagggaatccagcgtgaagttgtttgcgcgcagacgggcgttgaaacggtccagaccgaaataaatggcgtctgcgccattggctacggcggcgcgggcgcagtccatgtccccggcgggagccagcagttcgggacgcaggtctccgggccggagggcggaaagggtcatgtcgtcggaaatcacggggaaaagcaaagaggctgtaggggttattgagcggtgctgcgtttttccgcatggcggagcaatgctttcaaatctcccagaaggaacagggaacctgccgccagagcggggaacggggaagccagcgccgcctgcagcccgtccggaagcgtggaatgaatgaaaacggggccggtttcctgcccggccagcagggcagccatttcttgcgccggcatgatgcggggggaagtgcagggaaccaggtgccattctccggcaatttcccgcaaaaccggaatcatttcccggatatgcttgtctgcggatgcggcaaaaaccagcgccgccttccgtcccgggaattcctctttccacgtggccgcgagcacgcgcgccgcatgttcgttatgagcgccgtccagtaccagagggggcgtctcaaggcgttcgaaccgtccgggccactgtaccctggccagggcagcggcggctgcggcaggggagggaagggcatggagccgcctcatggtttccagcgccagggctgcgttttcccgctgatgggccccgggcagggatggcatgggcgttttccggtccgcccgggcaatcgtgaggggagaacggcggttttgcgccgttcgttcgatgacggccatgacacccgggtgctgcacggcagttacggacggttttccgggggcgatgatggccgctttttccgcagcgatctcttccagggtatctcccagatactgctggtggtccaggccgatgggggccagtacggcgatatccttgggcacggcgttagtggcgtccagccttccgcccagccctgtttccagaatgatgaagttcacgctgtttttccggaagtggcgcagggcgacggccagagccagctcgaaaaaggtgggcggctgttcccagccttccgccagctgtttcaggaaggaaatttcttctgccagggcatccggagtgatcatgtctccattgacgcggatgcgttcagaaaaatctaccagatggggggaagtgaacaggcccgtgacataaccctgcgccctggccagggcctcaatcatggcgcaggtggagcctttcccattggtgccggccacgtggaccacggtggcgttgatacggtccgccccggctgccgccagcagcttcctggtattatcaagccccagcttgatcccgaaaaattgggtggaaaagagccagtcaagggcggcggatacattcatgggcggtattttaccacgggaaaactcccgttcaactccggtatggcgtggggactgtaaaatgccgccgggaacggacgcggcaaacacgaacaagctaccgttgctacctctcggtcctggcggggtttgccagtcgtgcctccacggggttcccggcggctcacccagtaaactaggtttgcagtgtagtgtcaaccttcaaagacatcatctccttctggcgaaagagagcagaatggagatcagcaatattacgccgataacgactgccgccgtgaagaagatttcttcttcctgtctgagccggctgcgctcctcttcgagtttcgcgtctctgacgcgttgcagcctgtgcagggctttggcctgttcctccacatccgcctccgttcgcatgacaatcgtttcctcatggctgacggcctggtcgtaaggagcaatcatcgtgcggaattcggggtcttccgaaagtatttccgtctcatcataatcttccgccagaggggagttcatggtgtcccgaagactggcgatctgcctgtccacattgttttggaacaggtccaactcccttttggccttttcgtaagcttccgtctggtcgcgcagagcggcttccccctggtcggtaatgcgctccagttcctgcggaagactggcctgaagtttgagcagatccgtcctgttctccgtcactttaaaattcctgtttttcgtgttggacgcctccgcgagctggatgcgattgatgtcctgacgggtttccacctggcgtatttgttcctgaagccggtttcgggcgctgtccaattgttgtctggtggcgtccctcctgcttttgagttcttccacttccgcaacgcgccggtcatattgttccagcagatgggctattcgggcttccgcgcttcgggcattgggctttccgcttacgggagagggcgtctttttcccgtctttttcctggccggcttgctttattcgggcatcccagtatttgcggacggcttcttccttccgttgaacagctttctggagacgcaccgcctgctgttcgtgaagttccgcggcttcatcaaaacgggcttgggccgcatccagctccgggcagggttcctgctccatggctttgagggcttcatgcctgggtgcgaggccgttttgataataatcccagccgtagtatcccccggcgagcaacaggatgagaagtaggtaacgcatcaatgaaaaaaagggtagagtcagaagtaaatctcatagtgggagttccgccggattttgcaaactctaaaatcagccatccggagcttttcccctcaatagggagaatgatgataaattcactccggagggggcgtagttttccttgaagccatactttcaagccatgtctattttctcatcacgcagacaatttctcaaatctttggggcttgcggccggagcggctgccgccggaaatgccctccctgggaaggctgtggaaatccctgccggagaccatctctggaaatccgcctctccggcggctccgaggccttccggttccacatacatgggagggttcaaggctccccggctgggtcgcatcaggctggccttcatcggcgtgggagggcgcgggttctcccacctggcgcaaatgtgcgtgatggatggagtggaaatcgtgggcatatgtgatttgaaggaagagttgacgaaacgcggcgtggatcgcgtgctctccagaatggggaaaagccctttgggctattccggcggcgatatggaatacctgaccatgctgaaggagctgaagccggatgccgtcatcatcagtacggattggagttcgcatgccagaatcgcctgcgacagcatgaagcacggcgctcacgcctttgtggaagttcctctggccgtctctctggaggagctctggagcctggtggataccagcgaggccaccaggaaacattgcatgatgatggaaaacgtcaactatgggcgggatgaactcatgttcctgaacatggtccggcagggcgtcatcggcgatttgcttcacggggaggccgcgtatatccattgcctggtgacgcagctgggggacacgcgcggggaaggggcctggcggccggaatatcataccagaatcaatggcaacctgtaccccacccacgggttggggccggtggctcaatatatgaatttggagcgtggagaggaccgtttctgccgtgtggcggcgttcgcttctcctgctctcgggcgcaatgcctacgctaaaaagcatcttcccgccgatcaccgctggaacaatactccattcatctgcggtgacatgaatacggctgttgtcaagacgcagctggggcggaccattcttgtccagctggatgagacgtccccccggccttactcccgcgccaacctgatccagggaacggagggcacgctgactggtttcccaacccgcgtggcgggtgaaaagctgggcaacggcaattatcatgaatggattgaaggcagggaaaaactggccgctatttatgaaaaatacgatcatcccctctggaaacgcatcggggagctggccacgaaaatgggcggtcacggcggtatggactttgtgatgctttcccgcatcgtggaatgcctccggaacggagaaccaatggatcagaacgtttacgaaggagcttcctggtcttccctgctgccgttgacagcccgttccatcgcccagggcgggatgcctgtggaatttccggattttacccgcggagactggaaaaccaccatgccgctggccgtggtttcatgaataacgccggggatgaaggggcgctgccctcttccggagagttcaggaaagaatccgttcttacgcagggtgctcagcagggactgccggaaaacagattatttaattcttccgcgctcatgttcatgagccattgttcggggcctccggagaacaggtcgtccgccatgcggcgcttgtccttgagcatggcgtcaatgcggtcctcaatggtgccccggcagatcaggcggtgcacgagtacgttccggtgctgcccgatgcggtaggcccggtccgtggcctggttttctacagcggggttccaccagcggtccacatggatgacgtgggatgcctgggtcagcgtcaggccggtgccggcggctttcagggacaggatgcagaagggagggccggattccttctggaaggcggtgacgatgttctggcgttccggaataggcgttcccccgtgcagggtaagcccggaacggccgaagactccggacaggagatcgtgcagatggggaatgatggagcggaactgggtaaagagaatggttttttcctgcctggcggcaatggagacgcacagttcctgaagccgccggaattttccggagcgttccggtgcataatcgtccgtgccctggaactgggcggggtggttgcagatctgcttgaggcgtgccagaatgggtaaaatcagcatcaggcgggcagccgggtccggttcgtccaatacggcatgcagcatgtctatctgtgtctggtacagggcggcctgttccggcgtgagggagcaataggccggtatttccgttttgtccggcaggtcgggaaccagcgccggatccgttttcattctgcgcaggatgaaggggcgcaccaggcgtcgcagcggggcatagccgcgttccagggaacgggtgaaggattcgaagctttttctgctgcccagcagccccggattcagaaattccatcaggctccagagttcattcaggttattttccaccggcgtgccggacagggctatgcgtcgttctccatgcagggaacgaatggcgcgggaacgggcggagcctgcgtttttaatagcctgggcttcatccagaataatggccgggaaatgcaggtcggccagggcggacgtgcgtgcagccatgccatacgtagtgatgacggcgtggcagtctttccggcgcaggtttttttccggctgccacgggtccggggaggaagggtgcatgatgcgcaggataagctccggggcgaagcgttgcgcttcctctttccagttagacaggagggaggccggagccacaatcagagccggcaggccctccagccggccttttctccgcaatgtgtccagccacgcaatagcctgaagggtttttcccagccccatatcatccgccaggcaggcgccaaaaccctgttccgtaatccggtaaaggaaagagaacccttctttctggtaagggcgcatcagggcgtccagccgggaaggaagctccggtatggagactgggactttccccgccaggatgtccagggtctgccggaggttttgtcccggttccatgacacagtcttcgtccggttccggaatctgtacaagctggccggaagggccattaaccagcattctcagaccctggaccagaggaatgccgagggagctcatcatacgtgccgcttgagtccaccggtccattaagtcccggaccttccgggcgtccacgcgcacccattcccccttgaagcggatcaggccgtctccgttgatgagcagttcccccagctcctccggggtcaggtctttgcctcccagagtggcggatacggaaaatttcagcagactgcggacggaaagcccggaagaatggaccgttttttcacttccggatgcgtctgccgtaacttttacctgtagtttgggaggggtttttttccatagattcaccatgcgcacaatgatgcctgcgcgttcgtagagcggcgtgtcctgcagaaaatcccgggcctccggagcgctccaggccatcggcgtataaatttttccgttatccagcaggcgcttcagcagggggctttcccgtgccgcttctttcaagggctggagtacggccagcaaggcggtgtaattcccttcatgaagtttcagggcggtggcaagggggaggtggcgcacctggttgtccgcagcgctttgatgcgcaaaggtagccatgaaagcaaaggggcgggagcctgtggcgtcatcccggttttccgcaaggtggaaaaataccttgcctatctggttccagggcgcgcccaggctgttcaaccattcggcgggggtaatgcctcgggcgcggatttcctttgctattgccttccgcaaatcttcaaaccatccggcaatgatgtccggagtggcatattccgcgcccggtacgggggggaattgctccgccagaaaggctttttccgtagcggaggccagcaggtggtccagaacggcatccacctcgtccggcctttctgcggcagcgtgcgccatgcgggtaagcgcctggcgcgccatgttcttgataaagaaggcgcccggatccggaacggtttcccagttggataccgccagggcatacagcccgtttccggttccttcttcaaacagacggtcgaaaggcggcgtgtccgtcaccaaagcaccggaggggaggatgcggaaaccattgatattccgtttctcttccggtactgcatgataggggtccggctgcatggcgggcaggaatgtagcgtgtgcttgcggccgtagttcacagggcgaacgtcgtatctctgatgatgggcagcttggacggcggaggattgagcagcttcttgatttgtttcaggtaatcaatcagggctttgcggacatctattcccgtcggtttgccgtttccccgttggggaaatatgaaattgctgcacgggtagtctcccatcgcgacagtataaatgaccccgtttttcaaagtgctggtaatgctgggcgtaacaccgtccatgatctggtaggagaatccggagcagtacacttccagaatacctccttcgtcatcggtcggagacatgaatttggacaggatcagttgctcaatgtccgctttactcatggagcaggtgacgatcttttcccggaagggttccagctcgtaaatgtccctgatggtaacgggtcctttgttaagatggtttttggaccgtactccgccgcggttgtaaatggcaatgtccgaatgggaggcctgctgaatggccttgcagaaaagggtgcctatggtgacgtgcgtgatttcttctccggcgacgcccacctgctggttgaaaagcggatttccggaaaaccggcggacaatttcctttacttccggatcgttgggaatgtctgcgtccaaagaaacggccctggttgatttggaaaggacggaaacgggtttttctgtggagaagatgatttccgtaactcctacgtggctcaaactatgtcccgtgtggctgagcagcgtgcctgttctgagatgaccgctgggaagcatgacatgggtatggcctccgagaatgacgtcgatattcggcgaatacttcatcattttcagatcattgccgtatcccagatggctgaggatgacgttaatggtgttgtggtgaagccggaacctgtccgtgatgcccttgtaatgttcttcatccggcagcgtccatgagatgccggccatcttcctcacatccgtggtttgaaggtccgccagacctatgaaccctacggaaacggacgtgccttcaatcgggatgctgacatacggagagaaacagttttccagagtaggggaaagattggcgttggtaatgacaaacttggtggaaggcattccctcaatatggtcgcgcagggcctcctgcccgtagtccaggtcatggtttccgatggtcactacgtcataccccagtttattcatcaggatggtaaggggttcgccccgtttttcacagtcgtccacatagggattacctatgaaataatcgcctgaatccaccagcagcacgtgcggatatttagcgcggtattgttttaccagtgtggccagtcttgggaaattgtccagattgccgtggatatcgctggtagaaatgataatcagcgttttatcgggatccgatttaggctcctgagccagagagaacgggcacaggcatgccagggaggcaagaacaatgcgtagcggaatcatgcagggtaaaatgataaatatacggaaaaggatgaaatgggattaacgggcggaaacctcatgcgggccgtcacccacggagatgacttccagacggaccctggatacgccgcgtctatgcaggccgatgcggcttgcagcggcggtggtgaggtctatcaggcggttgctgtgaaaaggcccgcggttgttgattctgacgacggttgatttgccggtttccaggcaggtgactttcaccttgcacggcatcggcagggttttgtgggccgccgtcatggaacgctggggattgatgtactctccggaagatgtcttcaggcggcgcgctttgccgccataccaggaggcatagccggtctcatggtattgcagggcatccgccacgctcatgggagtatacctttttccacgcacccggtagggcgcatttttgacatgcgcctctgcctcctgaacggacggctccgttttctgagcgcacttctccgtagtggagcagcccggcatcagaaaaaacagcaggacggggaagaaccatttcacgctttttacgtttaacacatattgatgattttgtataacaaaaaaggaacaagagttgaaatttaaggaatagagcagggcggaacaatcttttcccggttgcggtttaccagttgagcggctcggaaaaatgcagtatgatctcccgcatgaattcttccaaggtaatcggcctggtcgcgctggcggaaaaaccgggactgggggaagcgttgcgcatcatgcgccgggaactttcccgccacgggctgggctcctgcgtcattgaaacgccggatgccctggaacgggctatcgggcggtgcggcatgctggtgaccttcggaggggacggcaccatgctgaccgtctcttccctggcggccatgcaccgcgttcccctggcgggagtgaacctgggccggctgggattcatgaccacctgttccgtgcaggaactgccgcttctggcgtatgcccttcaggaaggttcctacctgacggatgaacgttccatgcttgaagtagtacgggcaggggaagacggcgttgcggctcctccccgcaagctggccttgaatgaagtttccctgatccgcgcccagtccggcaagatggtggacctggatgcggagatagacggggaattgctgaaccgctaccatgcggacggcgttctggtttccactcccaccggctccacggcatactccctttccgccggggggcctttggtctggcccatgtcccgtgtcgtatgcgtcacccccatttgcccgcacagcctgaccaatcgttccgtggtgcttcctgacaccatgaccatacgcctgcggccccgcgagcgccgcggccgctttgactccatggtttattccctggacggccgttccgcctatcccattgaagtgggagaaagcctggtaatccggaaggccccggaaacgctttccctggttcatctccggaagcagaatttcggcgccctgctgagggccaagctgcgctggcagggggcggagatcccttccgatgatgaatagaccgtcgcggaagcccggctcctggcgggctgttccctccctgcggaattcccgcatccgggaacagtccttcgttcatcgttccgcattggcgcaggggcggtaaaacgatttttttaggatgcgggcttgacgaaaaggcctatcctatcatactcttcctgccctgccaccaagggggtggcagatcttaatcgcataaacgcgtaagaaatagtcatatatgaagacccacgtgaaaaaaggtgatgaagtggaaatcatcgccggacgtaaccacaagggcaagcgcggcaccgttctcgccgtgaatgcttccaaaggtactgtcatcgtagaaggcgcccgcaccctgaaaaaggctgtgcgcccgaccgaacagaacccggaaggcggcattcaggaaatcaacggcccgattcacatctccaacgtgaaaaaagtaggctaggccatccggtctgaccctgcgcttaagccatatcaatcattaataaagagctgacccgctaaaacaatgagtacaccaacactgcaaacatactaccgtgaaaaggtcgttcccggccttcaagcgaagcatgcatacaagaacgtgcatcagattccccgcctggagaagattgttgtcacctcctgcatgggcaagcacccggaccgcaagcaggccgtggaagatgccgttaatgaaatcgccaaaatcaccggacaaaaaccctccgtcacctatgcccgcaagagcgtggccaacttcaaggtgcgtgaaggcgaacctctgggagcccgcgtaacgctgcgcggcgcccgcatgtgggaattcctggaccgcttcatcaatattacggctccgaacattcgcgacttccgcggtcttccctacaagtcctttgacggcaacgggaactatgccgtcggcatctccgaccagtccattttccccgaaatcgagcttgaccagatcaagcgtcagatcggcttcgatatcattttcgtgacttccgctcctacggacgatgaaggccgcgacctgcttcgcgccctgggcgtccccatgcgcgaaccgaagaaggccgaagaaacccaaaccgccaacgcctaactatttcttaccatggccgtattaagtgatcccatttccgacttcctcacccgcctgaaaaacgccagcctggccggcaacgaggaatttaccgctccctgctccaacatcaaggtggaaatcgcccggattctgcaggaagaaggctacatctggaactatgaagtgaccggagaaggctccaagaagcaaatcaaggtgaagatcaagtttaccccgcagggcaagccggtcgttaccgatgtgaagcgcagctccaagccgggccgccgccagtacgtttcttccgaggacattccccgcgttctcagcgggcttggcattgccatcgtctccacctcccgcggtgtgatgaccggtgcgcaggcgcgcaagcagagcattggcggcgaacttctcgcccttgtatggtaaccattaacatttcctaaacatatgtcccgagttggtaaaaaatccatcacattgccggacaaggtaacggtaaaggttaacggctcttccgttcaggtggaaggccccaaaggaaagctttcctggacgcttccggaaggcatcaccgctaccgttgaaggcaatcagctctccgttgaccgcgtcggcgaaagccgtcagcttcgcgccctgcacggtacgaaccgttccctgttgaacaacatggtcatcggcgtgtccgaaggcttcgtcaagaaccttgaaatcgtcggcgtcggtttccgcgccgccgtcaagggcaacatcctggatctgaacctgggcaaatcccatccgatcaaccaggtaatcccggaaggcctcaaggtaaccgtgactgaaaacacgaaagtgacggtcgaaggcatcgacaagcaggtcgtgggccagtttgccgctgaagtccgtgcgtactatcccccggaaccctacaagggcaagggtgtgcgtttcgtcggtgaagttatccgccgcaaggaaggcaagagcgtcggtaagtaattcaggtaataactattacaacatatttatacacgatgagtactatcaatcgcaaagccatccgcgccaaggttcgccgccgcatccgcagaaaggtttccggaacggcttcccgcccccgcctggctgtctatttctccaaccgccacgtctatgcccagatcatcgacgatacggtgggcaagactatctgctccgcttccacggccgatgcttccatcgccgatccttccaaactcgccaactgcgctaccgctaccaaggtgggcaatctgatcggcgaacgcgcgaaggctgccaatgtcactgaagtcgttttcgaccgcggtggattcaagttctgcggtaaggtgaaggccctggccgatgccgcccgcgaaaccggtttgaaattctaattgaaagattccctaaatgaataacgaaacggaaaacactgctcctgctacggaagccgccgctcccgctcaagcgcagcaacccgcaacgggcggccgcggaccccgcggaccccgccgtgacggccagaatggccgcggaccccgcggaccccgtcgtgacggacgccgtggccctcaggctgaagctcccgtggaagaaggcccccagctcgctgaaaaggttgtgttcatcaaccgttgcgccaaggtcgtcaagggcggccgccgcttctccttctccgccctcgtcgtgagcggagacatggaaggccgcgtaggcttcggcttcggcaaggccaatgaagtggcagacgccatccgcaaggctacggaagccgccaagcgccagcttcgcccggtctccatcgccaacggcacgattccgcatgaagtctactccgaattcggcggcggcaaggtgcttctgaagcccgcctcccccggtaccggcctgattgccggcaacaccatccgtgccgtgctggaagcagcgggcgtgcgtgacattgttgccaaatccctcggttcctccaaccacgccaacgtggtgaaggcaaccctgcaggctctcgcttccctgcgcacgagcgaccaggttcttgccgaccgcggcaagaagaaggaaaaggccatctaatctgatcaggaggcggcggcccggcgccgccgcctccacgaaatccaaccattgtaaataacatgttacagcttcatacgattaagcccaatcccggagccaagcaccgcaagaagcgcctcggcaacggggaaagctccggtctcggcaagacctgcggcaaaggcaacaaaggccagaaggcccgctccggcggcacgattcggccgggctttgaaggcggccagatgccccttcaccgccgtctgcccaagaaggggttcaacaatacccgcttccaggataaaatcctcattgtcaacctctcccagcttgaacgcgtgtttgaagccggcgctacggttgatgaaaacaccctgcgtgcagccaagctcgtccaaggtccctgcgacgccgtgaagcttctcggcaacggcaccctgaccaagaacctgaacgtagtcgtggacttcgtgagcgccagcgcccgcgagaaggtaacccaggccggtggcaccgtcaccgtgcttagcgaagcctaatcacatttggcgaaccgggtcatgcagcttgacccggttcgcatcattgtgtttactgttgcggttcccatggatgccccgggtgcaaaccgccgcgacatgcaagccaagctgcgcgccaacttttatattacaggaccatgatatccgcatttgcaaactccatgaaagtaccggagctcaggcgccggattttgttcacactggcgatgattgtcgtcgtccgcctgggggtacagattcccctgccgggcattgatgtcatggagttgcagaaagtgattgaagcctccacgaacgccagcggccccggagcgggtctggctaccgtgctgaccattttctccggtggcggcctccagcagtgcggcatttttgctctgggcatcatgccctacatttccgcttccattatgacccagctcctttctgcggtggttccccagtgggccaagatggtgcgggaagaaggcggccgccagaaaatgaccaagtggacgcgcgccatcgccatcgtcattgcccttgtgcagggctggttcctggtcggcacgctggaacatccggaacgcctgcaggccgtgggtctcaacattcctgcggactgccagcttgtcattgaccccggcatccagttcgccctcatgacggtgctcattatggtggcgggcaccatgttcctgatgtggataggcgaccagattacggaacgtggcgtcggcaacggcgtttccctcatcatttccgtcaacattattcacgcccttccgggggcagtcaccctggcctggaaaaccttggtgtacaaggacggcgcggttgttcccatgggagccatgctgctcgtggccctgattgccttcctgattgtcgtggtggcgctcgtcgtgacggtgacgcaggcccagcggcgcattcccgtgcagtacgccaaacgggtcatgggcaataaaatgttcaacggcgccacgcagtacctgcctctcaagcttaactactccggcgtgatgcccgtcattttcgctacggccatcctttcccttccgcaggtcctcttctcccagatcgcccactacaacactacgctgcagtggatcgcgaccaagatgaatgactggctgaatcccgcttcttccggctattacattatttccggactcatgattttcttcttctcctacttctgggtggcgaccatgttccagccctcccagatcgcggaagacctgaagcgcaacggcggctatattcccggcatccgtcccggcccccccactgcccttttcctggaccagaccatgcaaaggctgacctttgccggttccgcattcctgaccctcatttacttcctgccttccctgctgaatatcgggggcaatatcccctacctggtcacccagttcttcggaggcaccagccttctcattctggtgggcgtactgcttgacatgatgcgccaggtggaaacgactcttctttcccgcaattacgacggtttcctgaaaaaaggcaagcttaagggcaaatacgggcacatccagggtaccggcgccgctgcgggcagccgcaccgttaccgtcatgtggattgttatcgccctgcttgtgctggccggagccatcgcctacaacgccatgcagtaagccccccttttttactgaaagtaaagatatgaaggaactcaagcatttcattctggttggggctcccgcatccggcaaagggacccagggccggtttctggctgataccttcggccttcactccctgagcaccggctccctgttgcggagggaagtggaatcctgcacggaactgggccggaaagccttgagctatatggacaaggccatgctggttccggacgagatcgtcaacgacatggtgcgcggctggctttcggaaatggacaatgacgcatggctgctggacggctatccccgcacggttgcgcaggcggaagccctggaccatttcctgacccagcgcggaacctccgtggacgtggtcgtctggatggacgtagcccgggaactcattgaacagcgcatcatgcaccgccgggaatgctccacgtgcggccatgtggtgcagacatcggaagaggaatgctccaaatgcggaggcaaaatggtctcccgcaaggatgacaacatggaggccttcgcccgccgctggaaagactttgaagccatgacgctgcccgtagccaggtactacgaagcccgcggcctggtggttaaaatgacggtaaccgaggaacgggaacctgccgaggtttcccgcgacctggcccgcaagctggaagaataccggcaatagaaagacgaattccatggcagaacgaatccacatcaagtctcccggcgaggttgccaaaatgcaaaaggccggagctgtaacggcggaaatcttgatggagatcggagccgaggtccaggcgggccgcaccacgcgggaaatagacgacatcgcgcgtgaaatcttcaagaagcacaaggtaggcaactccttctaccagtaccgcgggttccccggccagctctgcatttccatcaatgaggaagtggtgcacggcagcggcggtccgcgccgcatccagaacggggacatcgtgagcctggacgtgggtgccattgtggacggctggcatggagacaacgccatgaccgtgcccgtgggcatggtggacccggaaaagctgcgcctgctggccgtgacggaggaatccctgttccgtgccattgaactggtgaggcccggcgcgctgctggcggacgtctgcgcggctgtggagggctttgtgcgtccccgcgggtacaccgtggtcagggactttgtaggccatggcataggccgccatctgcatgaagagccccaggttcccaactaccgcccccattacaagcttccgcgcctgaaaaagggcatggcgctggctatcgaaccgatggtgaacgccggcaggccttccgtcaagattctggatgacggctggacggtcgtcacggcggacggcaagccatccgcccactttgaacacacggtcatcgtgacggacggggctcccctgattgtgacggagcgcccccgcatcgcgttgccggagcagctcggcatcgcccctttgtaactccagccccgcaagggaatgacgccgccggacgcccagattcccgctcccgtaattctggagaggacggccacgcaccggatggtgtgggtggatgtggcccgtgtgattgcctgcatcctgattattgcaaaccacatggccttctattcggcggagctctaccggtggatatgggcggaatttctggcggcgcgcactccctttttcctgctggcggcgggttactttgtggggcgcggttcgttcggtccgctggacggggggagctttttcctgtggaagcggagctggtttcttctccgcccgtacctggtgtgggggctggcggcggccgttctgatcggctggtccccccttcatgaatactacgcctcctaccagcccatgtatgcatggctgaagggggaggcgggcagcggcttctggtccgccctcgcggcgttcggccgctgcctgggcattgccgggcacccggtggacgcccccatgtggtttctgcgcgacatcatcatttataccgctgtagcgcccctcctgtaccgcatggggaactacatgctctgggtgggaatcatcatgctctccctgaactactttgcgctggacctggcggatcatgactatcctatcgccaacagcctgggctttttcctggtggggatgtacgtatcccgttactcccttccgttcctgacggaatccgtgcgacggtatgcggtgccgttcctgcttgccacgctcgcgctcacttggtggctggtgggccaccgggaccagcacaactccatgcttattgcgctgggaatgctggggctgatgtccctggccattctgttcacggaatggtttccgcgcgcggccagatgggtggcggggctggccccggcgtgcttcttcatcttcggcacgcactacatcgtcatcatcctgctgcgtgaaagcggctggattacgtggaagggggaggcctgggacgtcctgtggctctgcctggttccggtcatcttcgccgtgctggcggggctcttcttctgcatgaaaaggtttgccccgcgcctggttcccctgctgggagcctacgggaaatagccgccctgcagggccgttcctccggaccggaaaaggagccgcgcttatctcttgccgtcaaaaggcaaatcccttattctttcctttgctggaaggggtggaagcggcttttttgtcacgttgccgttcttgctccacggccgggaaacaatacatggtatggcaatgattcaaggcgagcaggttcaggattcggaattatcaactcaggcggtgatctatctgggcccgagctccatgagcctgatggtggctgaggtggttcaggacaggattcgcctgctggacttcctccagcagcccgtgcccatggcgcgggacatcttccgtttccaccgcatttcccggcataccatggaccgttgcgtgcaaatcatcggagactatctggaaattctcaaggaatacggaaccggcagcaggctttccgtccggctcatgatctccaacatcatttccgaggcggataatgtggacgtgttcgtcaaccgcatgcacgtggcccacggcctgcggggacgccggattgacgacggcaagatgacgcgcctcatttacgtgaaggtgcaggaaacgctggcgcaatacccgggattcagcaagaaaaaggtgctcgtggtccatacggggccgggcaatacccgcgtgctcctgttccaaaaggggcgcatcgtgcgctattcctgctaccggctggggacgcaccgcacgggcgaggccgtcggagaaatagaatacggggacgatgtggcggaactttccctgctacgggagcacatgcgcgggcaggtggaccagatttgcctggattacggcggcgtcaagggcctcgctgggctcatcgtcatcggccaggagatgcagcagctccgtgaccgcctggaccccacgccggaaggcaaggtggcgtgttccgccttggtggcggaagcggaacggatgtcccgcaccaccctggagcagcgcatgaacgtttacggggcggactttgccggggtggattcccttctgcccgccgtgctgatgacggagatgattgcccgcagcctgaacctgaatgacgtgatcatccccggaagcggctatgacgaggaattctcaagcagcctgatccgggcggaacagcatccgggggacctggaggcggaggtgctccacttcgccgggattctggcggacaggtacaaggcggacaaggggcaccgcgagcatgtggcgcgcctgtgcatggaaatgtttgaccagctccaggacctgcaccgcctttccgagcacgaccggctgctgctggaggtggcctccatcctgcatgaggtggggtctttcatcagccagcaggaccaccagctccattcccagtacatcatcctgaacagtgaaatcttcggcctttcccgggacgacgtggaaacgatcgccctgttggcccgctaccatcggcatgaggtgcccgccaattccgaccccatgtacggggagctggagctgacggaccgcatgcgcgtagccaagatggctgccatcctgcgcgtggcggacgccctggaacgcggccatgcccagcgcgtgaacggcgtccgggcgcgcatccggggccggatgctggagctggagctccagggcgtgcgtgaaaccgccgtggaagacctggcgctgcggctgaagggcgacctgtttgcggacatcttcggttatgacgtcgtgctggtgccccagcggtaggctgattcaagaaacttccatcccttattttctccatgtctaacgaatacatcaacagagagctctcctggctggaattcaaccagcgcgtgctggaccaggccgtgagaacggaccttcccctgctggaacgcctgaagttcctggctattaccgcctccaacctggacgagttcttcatggtgcgcgtgggcggcctccagatgctgcggcattccggctcccgcgtgaaggacatttccgggctgaccccaacccgccagctcaaggacatccgcacccgcgtgggccgcatgattgaggaccagtaccgcctgtttcatgaagaaatcctgccgtggatggaaatcaacggcatcaatccgctggccatggaggacctcagcacttcccagaagctgacgctggagcaatacttcaacaaccagatattcccgctgctgacgccgctggacatggatgcgccggaggctcccgcgctgccgtccctcaagctgctgatgggcgtggaactgcgggacaatgaaaccggggaggtccgcgccagcgtggtggccctgccggacggcctgccgcggcgcgtgcccgtcccttccgcggaaacggaacgctacgtgatgctggaggacctggtccgggaatgcatcggcaccgttttccccggtgaaaccgttctctccgccgcggtattccgcgtcacgcgcaatggggacattgccgtgcaggaggaggacgccctggacctggcggatgaaatggaggaagtgctggtggcccgcaaattctccgaatgcgtgaggctggaaatagaatcctccgctcccgtccccctgcatgacaggatcatgcagatcgtcggcgcggggaaggaggaaacgtatgacctcaagggccccctgatgctttccgacttcatggaaatggcctttgcccccggcaatgaccaattgaaagtggagcaatggtccccgcagccgtcaccctccgtggaccctgccgtcagcatctttgaaaacatcgccaacggagacatcctgctcaaccatccctatgaaagctttgaacccgtcctgcgcctggtggaggaagccgcggaagacccggacgtcatcgccatcaagcaggtcctgtaccggaccgccaaaaactcccgcatcgtagccgccttgaaaaaggcggcggaaagcggcaagcaagtgacggcgctggtggaactgaaagcccggtttgacgaagcccgcaacctggaaaaggcggaggaactgcagcgttccggcgtgcaggtggtctacggcgtcaagggcctgaaaacccatgccaagatatgcctggtggtgcgccgggagcagggcatgctgcggcgttactgccacttcggcacggggaactacaatgaaacaaccgccaagatttacacggacatctcctacctcacctgtgacgaccaattgggggcggatgcctcccagttcttcaactccgtaacgggacgcaccaagctcatgcgcttccgcaagctgtacccctcgccggtgctgatgaaggctcgcctcattgaactcattgaaggggaggcggagcgcgcacggcagggggaaccggcccgcatctccgccaagatgaacagccttcaggatgtggaaatcattgacgccctgtacagggccgcggacgccggggtggacattgaactgaacgtgcgcggcatctgctgcctgaaaacgggcccccggcccaacggcaaggtgatccgcgtggtcagcattgtggaccgctatctggagcacgcgcgcatcttcttcttccaccacggcggcaaccaccagctcttcattgccagcgcggactggatgacccgcaatctggacaagagggtggagctcatggtgcccgtcaccaacgggaagctggcgcgccgcctcaaatccatcctggacgcctgtttcagggacaacgtgcaggcctgcaatattttgcctgacggcacttccgagcacgtcgttcggaaaaagggccagaaagccttccgtttgcagcagtacctgaccaaggaggcccgccgcttggccaaggacaaggaacgggaacgccagcagatgctggagccccacacgccgcattaacccggtccggagcattgggccgcatgcgtggcatcctccggcataccttcaacacgtagcggtccggaacatgtcttttcatgagacatgtttgcccgcgtatgctgttttttcctgatcgcgctggctggggggtacggctctgtatgggcggaaggttcggcatggcaggcgtccgggcctgcgggccccggagcctccgtaagggctccttcccatccggcggaggatggcttgtactcccgtctgaagaagatgccctatctctatgacaacaaggacgcggagttcctgaaccagttcaagctgctgctgacggggcagtaccagggggctcaggtctccccttccggagccaaccggttccgcaagggctctcatggcagggaaaacgaatggcggaggctccagatagggtttgaagccgttttcttcaaaaaccgcctgacgctgcacagtttgaccaacatgggggagctggacggcatgtacaaggtggaggatggccgctggagaagaacgaagacggactggagcatctttgaactctacctgaaatacaaggtcaatccctccttctttgcgcgcgtcgggaaaatcacctccaagatgacggcggaattccgggagacggccagtgaactcaagaccctggaacggtccgacctggtcaaccagctcgggaccatctccagttggggcgttgtgctggaaaacccgcggcaggacgtgcccgtggggtgggaggcttccgtcttcctgaacgacaccagcgacagcctggcgcatgaaatcaggtttaatacggcggacaatgcctttgccaaggcctccgtccatctggacgcccgcggctttctgccgggggagaaaagccgcgtctggctgacgtatgcccacaacttcacccattacgcggggcgctccctgccggaggattcctattactccgggcttggcgcccgggatgtggcggcggtggactgggtcatgtcccgggggaaattttccatggtgacggaactcatgtccggcttccgcgtggtggggacctctctgggagagaatgtttacggcctggcggtattgccttcctacaggttttccccgcatctggaaggcgtgttccgctaccagctctcccatgggcgggacgccgtgaaaatgtacgcccgctatgttcccgcggtgaccacctatcccaaatgggtcagcacgatgaactccttttacttcggcctgaattattattttttcccggaagacccggacatgctgaaattgatggcagggggggaatatacgacgaccagcggagcgccggaaggcgccaggtgcttcagcggatggacctggtttgccgccgtcaggttccacttttgaacggggaagggcagattcctttcctcccgggggattggcccttttgcgggcaatcatgcgggagccgtttacaacaaatagtttgccctggactgtgccttgtggtaggaagggagggagatgggaaagcccgcctttttccatctctccccaccccccctagaatgatgaaatttacatattctctctgcctgtgcattcttgcctgctgcgtttctctggcccagacggcttccttgcgttccgttgttctccctcctccttccatgaaagtggaatgccgcgcggatgagagccccgtttccatttcccgggcggaaatcaagtctcgcgtgatggatttcctggcggaaacggaagtgacgctggtttttcacaaccccaacacgcgtgtgatggaaggggaattggtgtaccctctcccggctggagccatcgtacaggggtatgcgctggacatcaacggccgcatggtggatggcgtgccggtacccaggcaaaaggcgcgcgtggcgtttgaagaagaggtgcgcaaacaggttgatcccggactggtggaatggtccggcggcaacatgttcaagacgcgcgtatatcccattcctgcgggaggaacccgcactgtgcggctgcgctattccacggttcttcccgtggatgccgcaggagcgccgtccctgcagcttccgatgaatttcaaggagaaactggattccctcaagctgagggtggaagtgttcgccggccggaagcccgttgtcgtttcctccccgctggacaacgtggaattcaaggattggtgcagcgccttcctggcggaaaaggaatggaagggtctgtccctgacggaagacctgttcatctccctgccgcgtgcgcagggaaaagatgcggggagagcgaaggtatttgtggagtcctttgacggcagggactatgccgccgtgattattccccggcctgagcggacggacggaaagagcggcgtggaagccgcgcccacgatagagctgctttgggacgcttccggttccatgaaaggagcggatgtccggaaattcctggattttctgaaacgatatcttgcttgcggcagaacgcaggggcggcaaacccgcatcaacctgactgttttccgggaccggatcatgccttcaaaaacgttcgaggtcgctccggacaatctggacgagctggcccgcgaactgctggctctggactatgacggggccacgtgtgactggagcgctgttcgggaaaagctgagcgcttgttccggggcgtcggactgcctggttgtcagtgatggatttatcaatttcagccccgtgccggaaaagcgggggactagctccgctaaaaccttcgccctgatggtgacaccgcgcaaggatgcgaatacgttcatccggatgggcattcctgtgatcgacctggccagtcaaacggcggagcaggcgatggagcgcctcgtcaggggggaaatttccatccgttacattattgacagggggaatatgccctggaggacgttttcaaggtatgaaattcctggaatgccatcggattccgtccttttgctggcggaactggagccgggttcctaccgcgggacggtggaggttgccggagtggaaattcccgtggcggctgatgcctccggggggacgcccggaaccatgctgagggccttgtatgcccaggcaaggctccaggaacttctctgccgtccaccctctgccgttagggatgaagctgtggggaacctgggaatggaatatggaatcgtgacgcccggtacctctctgctggtgctggactccctggagcaatacctgaaatatggtgtgcgtcctcccgcttccgcttcagaattgcgggcggaatatgacaagaggatgctgaaacgcgaacggaaggaggacatggctgaagagaccgcaagattaaaccgcttgaaagcgtgccttgcttcctggaaagaaatgcagaaatggtacgcaaaggaatttttcaatccggaagagatggaaagcgtcttgaaagatgaccggttgaaacaggccttgattcatacgtgccggggcaatgaccgggaggcgctggaaatctaccggaaagtattgaaggatgagcgtaataaccggacggccttgaagggcgtcacggtcatggaaaggcgcctccgggaaaaagaagcacaggctgaaaaagcctctggggaaaacgctgcccgtgacagggagctggctgaggcaagagcaaacttgaacagagaactggacagggagcctgcggacatagcgggaagcctccgcctggcctacggcttttatgaccttggggattacgataaggccctttccctgtttaacaggatattggaaaaggctccggaaaatgtttcggcaagaaggggtgcggagactgtggcccgcagaaaaactgcctattactccgccgcttatgatgaaagaaggagcgccatgctggcggaagtggattctctctgggagcgtccggccggatcctctccggaggatgaaaattcgggggaatccgctccggcgcctgttatagttcaaggtaacaatatatccggagattccggtgctgtcatcagggcgtccggaagttttagtgcagaagccgggagttctccggactccgcctccccggatctgctggagaacgagaattccgctccggaaaatcaagaggtggtagggtccctgttcctgggagggggagaaacattaaatggactaaaggcgcgggaacaggatgccggttcttcccccgtcatgaacgtgaaggcgtgggactccaaggctccgtatctggcggctctggatgcggctgaccgcccttttgcggtctatatgaaactcaaggaaaagtatggggacagccccggtttttacatggactgctctgactggtttgccgggaagggggacaaggcgctggctgtccagattctgtccaacctggcggagctggaactggaaaaccgttccctgctgcgcatgctgggctacaagctgcgttacatgggagaactccggcaagccaggttcatttttgaaaccgtaaaaacgctgtttccggaagaaccccagtcctaccgggatctggcgctggtgctggatgaactgggggaatcccaaaaggcgttcgacatgtaccgggaggtgctggaacgcccgatgccccgccgcttcaccggcgtggagcagattgtgctggtggaactgaaccggcttgtttcccggagcagggcggcgggagtgaagctggataccggggggctgaaccctgcctttctccagccggtggaggctgatttgcgcgtggtcatcaactgggacacagatgcgtctgacatggacctttgggtcacggacatcaccggagaaaaatgctattactcccatcggctgaccactcatggcggccatttgtcccgtgacgtgacgcagggctacgggccggaagaatacctggtgcgcaaggctcttcccggtccctatctggtccagacgcattattacggcacccggtcgcagaaaatgctggctcccgttaccctgtacgcggaagtgtacacggattacggccgtccgcaggaaaagcggaaaacgctggtattccgcctgaatggccgggaccaggtggtggatgtgggaaaagtggcgtacgtacaggcgtgcccggcagaaggagctcgggattaccaggtgaaggccggggaaacccgggcgtccatcgctgaaagccggttgaaggacggaaagcgcgccggggaaattatccgcctgaatccggttctgaaagaccgggaacctaaaacgggggaaatcatcaaactgccggagtgattggagactgcggctcttctcgaacgcctgttgccgccggcggggctatacgccttcaaagacgcgcagcaggcgtttcagcaggttgattctggccttgcgtttccggaagccgttcccgaaggagaacggcaggtgccattgattgtggcgcaattgccgtcgcgtccattgcgtgaattcctccagcaattgggacagatggggccgaagggaggccgtttccatggccggcttccaccagacggccgcagacacgatgtattcctctgatttttccgggaacagccagggctttttggagccgatcatgtggaaaagcttccaggagcaggtggcgtggatgttggaaaccccggcgaattccgtgcctgcgcaggactcttccagtccgtttttccccagttcaaattggaaatggtagttccattcaacaggcagcggaaaaatctgccggtggaagacgatattcagcgcgtcctggtccggatgttccaggagctcattgtgttcttcaatgacgtggagcaggcggacttccgcatcctcctccctcattcggtccaggtccaggaccagcacgccggagttgaaatagtggaagggatcgtgcaggcccaaaggttgaagtttccggagctggcgccgcggataccccgctaccaggctgctcagcaccgccgtatcccgtacggcgcccacggccgccccgcagaggtccgtatcgtaaagctccgctacgtccgcatacaggaccgtatccgcatccagatagacaatccgggaatgccgggggaacaggctgggtgccagcaggcgcgcgtaggccagggcggaaaagcgtttcacgtccctccggcgcagcatctgttccagcttgccgggaatggtcatgaactgaagggctgcgttcggataaccggaaacggccttgtccagttcctgcatgttttcttcttccagcccgtcatggaccacccacagcctgtagttccgttccgggttggaatggcgtgccagggaatgcagggtgacggccaggcacacggtccaggcggaggtgacggcaaacatgacgtctatggcaggaggcgcagcggcagcatggaaggctgtgggcggtgcggcggaaagggaggagggcatgatgttaaaggatgggatggaatcagggccatgagccgtcaaacacggccagttggcgttgaagggttttgattttctcccggcgtttccggaaattccggcccggagagacggggaggctccattggtggtggcgcagccaggaacggaaggcgcgcgtgaattgccggtacagggcgcgcagctccctgcggaaagccggagtttgccgggcaaggggccaccagagggcgagatacaggcggtggtagattttttccatatccggcggcagccacggcttgtaatcacccaccaggtggaaaagcttccaggaacggctttcaaacagggccggagcttcttcaaactcggtgccggagatgaggtccgccattcccgcatggtgcagctcaaactggaagtggtaattccagcggaggggcagcggagcaatgcggccgtgaaagacaatgttgataatgtcctggtccacgtacggaaaggaatccggatgggcctcaagcagcctcagcagcctgtcttccgtttcctgctccctcatctggaccaggtccatgaccatgaccccggtattgcagtacaggcgcggattcgttacccccatgccgctgatgtattccagatggtcgggaaggcggcccgtactgatgctttgcaggacggcgcagtcccggacggcgcctatcggcgcgccgtgcaggtccgcatcgtaaagttcggccacgtctccattcagcagcacgtccacgtccaggtaaaccaccctgtcgtgccgggggaacagggcggcggccagcaggcgtccatatgtgaggggggagaaccgtccgcaatccctgtgctgcagaatgcgaagcagcctctccggaagcctgcaaaaccccagcgagacgcggggatagctggaaacggcttttcccagttccttcatctgctcttcctccaatccatgatgaacgatatggagttcataattccgccgcggatcggaatgcacgcaaagggagcgtatcgccacggccagcgggatgagccaggaggaagtgacggcgaacatgacggaaacgggaggttccgccatgccggataagggagagatagtcggcataaaaggaattcaacaggtcatgaagaagaatgggaaaagctgaaagcgtttccggtgcctgccgggaattccggtataaaggtagttgggagaaaggtcttgtttttcatggcggagatgaataccggaagagctgttgaaacagggaaaacgggcatccctgttccggcgttccgttattctctgcatgggacattcccggcggtgaaaacgctcatattttgtttgggcatcatacgaatttcaaatccgtcatggattaatatggaatgattcccgtaccgtttggagcgccgtaaacgcttgcggcttccggaagccaaaccgggaggcagcgaactctctttcctgaaagccagtgcgtcctgacggaatgcatgcatttcaacggctgagaggcttgccgcggtccaggtttccgttgcgtaattccggaaggctttttccgggggaaaacggtttcccctcgaggaagggccacgcaacgtaagctccttggtatgaaaatcggcccttgaccccggatttgaaatccgtttacatagggttttcttggtatgagcgcggctgtttccatcatcgtcccctgttataatgtagctccttatctggataaatgcatggaaagcctaactctccagacgctgggggaccttgagatcattagcgtgaatgacggttccggggacgataccccagccatcctgcgcgcatgggctgaaagggatggccgcatccgggtggtggaccgggaaaacggcggcctttctgcggcgcgcaataccggcatggccctggctggcggggaatatatcggctttgtggacccggatgattacgtggaacactccatgtatggccgcctgctggaaaaagcccgcaggagtgatgcggatgtgacagcctgcggctacaccagcttttccgacggagacggctccgtgctggaggaactgagctggtctccggctccgggcgtggacaagggggtgcagtcagacgtgatgcgaacgaactccgtctgggagcggatggacgtggtgacatgcaacaagctgtaccggagagattttctggaccggcacggtctccgttttgaaacttctttcagatccatggaggacgacgtcctctggctgatggtgctggcccatgccacgtgcctggctgtgataccggaccgcttgtattggtaccgccgccagaggcacggctccgtctcccagatgctggaagcgcaggaacgtcccctcctgctggtggcggaacggctgctgcatgctacggagtattggaaaaaatgcggctggctggaatccggcctggagcgcggctgggtactccgggctctgaggcattatcttctggtccggctgctgaatccggggcagcccctgccgcagttgagtgaggaggaatgggggcgcctgcgcggcaaatgccgggaatggtttgccctggcgggggaagcggaagcgttccggactctcggcaaatgggactttgagctatgccggatgctggcttctccgccggaacatcccggcttcctgtcccgtgcgtggtggaagcttctctcccgctgccgcggacggcggggacgttactacaggcttaaagggaagctttcctcttgcggcggtgggaaatagcttcccggcggactggttcttaacattctgcgcatcgttggggcttgcgggaacgcctgtgttgaagtaaggtagccgttgcgggaaaaggcgcgggcatcatgaatcatggtttccgctggtttttcccatgaaaaactgaatgatactcccgatttctctatggatggtactgtttccattattttaccctgctacaacgttgctccttatctggatgaatgcctggaaagcctggtccggcagacctgggaagacctggaaatcatctgtgtcaacgacggctccacggacgatacgccggccgtactgcgcggatgggctgaaaaggacgcccgcatccgggtgattcaccaggaaaacgggggcgccttttccgcgcgcaatgcggggctggatgcggcggcgggtgaatacatcggctttgtggatccggatgattacgtggatacctccatgtatgcccggctggtggaaaccgcgcagcggcatggtgcggaggtggcggcttgcggatatacctccttttccgaagaagacggcacggtgatggaagacgccgggcacgcgccggaacccggatttgaacctgatgccaaaaaatcctgtttcagcggtgagtccgtatggctccggatggacgtggtggtatggaacaaggtgtacaggcgttccttttttgaagaaaacggcctgcgcatgaaaccagggttccgcggcggggaagatgacattttctggctgacggcgcttccccacgcgtcacggctcgcagtcattccggatcaactgtacttttaccgcaggaaaagggccggatccctttccgacgtctgggaccgggacggatggttttactccatgaacatggaccgtctggaatatgtgacggcctactgggaaaaaatcggctggctggaatctgccgtcaggcagggctggctggcccatatcatgaagcgttatctgctggctcacgtcacctccgcagaggaaatcttccggcggctggatgaagaggaacgcaggggactggcggcgcgttaccgcaaatggttgaaaggcgtggaaatcggtcccggctttgcaggactgaacaagtgggaccgcgcgttctgccgcctgctgggtgcggaaccggtaaagctcggtccctgcgcgcgtcttcacagtaccctgatgtcggcatgcagcggaagaaaagggcggtaccaccgtcttaagctcctgttatccggattatcatgaagaccgccgtttccgtcattgtcccctgttacaacgtagcgccctacgtggacgaatgcatgtccggcctggcggagcagacgctgggtcccatggaaatcatctgcgtggatgacggctccacggacgggacgctggagcttctgtacaggtggcgggaaaaagacaatcgcctccgggttatcagccagtccaacgccggagtgtccgcggcccggaatgccgggctggatgccgcggagggaaaatacgtgggctttgtggacccggatgaccgggtggaccggaggatgttctcgcgcctgcttggcgccgctgaaaagaatgatgcggacgtcgtggtgtgcggttgccgggaattcgtggaaaaagacggtgtggtcgtccatgagggcggctggtccccggatgatgaattttatccggaggaacgggtggagcaattccgccgcggttccgcctggtgccggtgcgtgggtcccgtatacaacaaactggtccgcagaagcctggtggaagaacattccctccgttttgtggtgggcttgaaggaaggggaggacctggccttcctgctgatgctgctgcccttcgcaccccggctccggaccctgtcggaccgtttttaccattaccgcagggaacgtcccggctccgccacgtatggacgggacttgctgctgggcgacttccgcatggacctgctgggcatggaccgggtggcccgtttctggcagcggcacggcctgctggattcccccgccgtcttcgggctggtggactactacatggaattcatccgcaggcacttcatcatgaaagaaggggccttcttcaaggcgtcgccggaagaccgggaaaccctcctgtccgggtggaaaaaatggctggaactggtgggcggggagaaagccctctcccggctggaccggtgggaccaggcgttctgccgccttctgctggactatcccctccagggcaatttcttttcttccctgcgtgcccgcctgatgtcatcccgcaaaggacgccggggggcttattataccctgaaaaggcacttggcgaggtgagagggaaaacccttcttccctcggttttttggtgtggtatgagaccgtgaaggagccggaatgctttccggaatcctacaggcccgtgtagcacatctgctccttgagctgggctacctggaggtcttctcccaggtattccccgatgcagtagccgaagagcgtggcggctccgggaccgttggcggtgagcatattgccgtccagcaccacgttttcatccttcacgatgtgggctcccgcctcattgagttcccggtagacgtcctgggccgggtaggccgtaacgttcttgtccttgaccagaccggctttcgccagaacgataggggcggcgcagatggcggccaccagcttgcccgcggcatgcatcttcttgaccaggtggatgacttccggcgtgtcgcggagcacccaggcgcctgcgccgccgggcaggatcagggcgtccagcttgtccgcatggagcttgtccagcatggtgtccgtggtgacggtcacgtcatgggtgctgaccaccttgtcagactgcacgccggccagctgcacgtcaaagttcaggcggcgcaggatgtccagcggagccatgagttcgatttcttcaaatccgggggcggcgaggatggcggcttttttcatggttaatgagacaaggggagggaatggaacgttcaaggaaaagggggcaggatgccggcagccctacaggagaagcaggaccggattttccagcagcgtcttgaattcggcggcaattttggacgccttgcattccggcaggatgttggcgttcacgtacagggtgacgggcaggatgagcttggacacggggcgtcccgcttctatgcccgttttcggcgtggtgccgccgatgctgatgatgctgtggggcatttccgggagcacggtgcgctgggcttccacgttcacgccgctgtcgcagagcaggatgttgggcgtgatgctgcccgcggggggcggccctgccgcgggggcggccagccgttccatggcgatgttgtaaatcgtcttgccggaggcgttttcaataaagacgtatttttcccccttgtccagcaccatgagcagttctgcggcggagtctcccgccagccattccggctcgctgatgcacgctttcaccgcggcgcgcaccacgtagtcaaagaggctgtagcggccgccgatgagtttttcgcactggacggcgatgggcgtgctgatggcggccaggtaggccatgttcgcctccagggagtacaggtagaaattatccacgcgcgtggcgtggcgcgtgtcccggggcgccagcggggtctgcacccggcgggcggggccgtctgcggggcgtatggaggcgcgcacgtccgcggccatgatcttgccgcgtggtccggtgccgcgcagggttccggcgttcagcccggcttccgcggccagcctggcggccagcgggctgcatattgcggacgggcgcggggggcagccgcagacggctgcgccgaattccggctgaagcagcgcaatgggcgctcccgccgcggcggaacctccctccggcaccaggatttccgtcagggtgccgtcctcgcaggcctggagctccacatgggccttatccgtctcaatatcggccagatggtcgccgacttttacgaagtcccctgtttttttgaaccatctcaggacggtgccttcgtgcatggagtcggacaggcggggcatttcaatggtaatagccatggaggtgaatgttgaaatatggtaaaaaggaggaaggcgcgccggaaggggtgggacgtctccttccggcgcgcggaaacgcggttacgcgctgtatttttccacgccgtcgatgaataccttgcaggtattgaagtcatcgtccagcagaaccatgtccgccgtgaagccgggggcgattttgcccaggccttccaggcccagggactgcgcctggttccaggaggtggctttcaccaggtcgctgaggggtttcccggtcaggcggtgcacgtttttcaggccgtgggcgtatttgagggtgctgccggccagggcgccggattcctgcagacgggccacgccgtccttcacaatgatgggcaggccgcccaggtctccggggccgtccggcatccaggagcaggccagggagtccgtaatcatcagcatctggtcggaatccttgttcttgaacacggttttgagcatgtccgcgcagaggtggatggtgtcgcagatgatttcaatcttgatttccctgtccagcaggccggaccccaccaggccgatttcacggtggtgcaggggggacatctggttgcagtagtgggtcaggtgcgccagccccgcggacttcgccctgttgaagtcctcatgggtggcggcgctgtgcccggcggagcagcggatgccgttggccgtggctttctcaatgaattcaatggctccgggcatttccggcgccagggagaccagcagcaccttggcgatggagttcaggttggctacttcatcgtaatccggctggcggacaaaggcggggttctgcgcgccgcagcatttggggttgatgaacggcccttccaggtggacgccgggagtcttggcgaattcctggttcttcatgtattccgccacggaggcgcatacgtcttccagcaccttgggggacagggtgagggtggtcggcagccaggaagtgacgccttccttcattttgcattccgcaatggtgcggaggctttccagcttggcgtcgcaggtgtcgcagccgccggcgccgtggctgtggatgtcaatgaagccgggaaggagcatgcggccttccgcatccacgaccttgtctgcggcgggaagttcgctcccggcgggatagacggcggtaatggttttgccttccatttccacggcagccccgggcatatcgatgccgggggagatgatgcgtgcgtttttaatgagtgtcttcataaaaatgaatggttgttggatggatgttgatcgtcgtttttctccgttcgtccgcgtcttcccgcctggcctccgcttcctgcggaaaaccgggaatgggcggcggtgtgccggagatcgttcatgacgctggcagattcccggttatctggcggcgtccagggccttgttccaccgggctacgcgggcggcttccgctttcagcacggcggccgcggcgttcttgtccagaatgcggatgtccttgattttgtctccccggacaatggagttaacgacatcctgtcctttcagcaccttcccgaagaccgtgtggcggccgtccagatggggcgtggccacatgggtgatgaagaattgggaaccgttggtgccggggccagcgttcgccatggaaagcacgccggggccgtcatgcctgaggtccggggaaaactcgtcttcaaaactgtagccggggcctcccatgcccgtgccggtgggatcgccgccctgaatcatgaaattcggaatcacgcggtggaaggtgattcccttgtagtagcctctgctggcgaggttcaggaagttggctacggtgacgggcgccttggatgggtaaagggccagttcaatatcccctttggtagtggagatgacgacattgacgtccttgaggccggctgtggattccgcggaggcgctgaagcacgccagggcgcacaaggaacacaacagaagggtgagatattttttcatggcttcttgttttctcccctatgttgcccgaatagaagcagggttgcaagtaaatcgcgcgccctgacgggagaatggagcggggcgcgccaatgtagaaggtttttctctgaagaaggatttttaaagatgggcgcccggttgccggcccaggactaccttgagccggaagccgcgcgggaaaaacggaagaccgcccacgccatgaagaggctgagaattcccatgacgacgaattgccaggagggggggatgaccagcatcatggcgtattggaatccgacggccagcaacccgagcgcgcagtccaccaggttgccggcggcaatcatatccccgcgtttgtcattgtccgcccggtcctggaaaaaggcattcagaggcaccaggaacagggcggcggaaatgcccgccgccatcagcagggcattaaagaccggggaagccatggagactgcggccagggccgcgcagctcgccgccatcagcacgcctcccgccacggaaacattcatccggatgtggcggcggcaaatcacggaggcgaggatgccccccagcaccgttcccccgctcatccaggccatcagcacggctcccacggagctgaagtcatccccgccaccggagatttccttggccatctggatagtcatcagcatgaccgtgccgccgaagaaccagaaatagccgatgcccatctcgctgacgcgcagattgcggtttttccacagcttgcccagctgatggaagtgctcgtaaaacagggaccaggagaaggggcggtcccccccgggagcgtaccggggcaggcagaagctggaggccgccaccggaacggccaggagcagaaacaccaggcatgggaaagaggcggcataccatccgtcattgatgccggagggtttcagacatgcgtcaaaccattggaagaagccctcccccagccagcggtgccagatggtatccgtggaaggttccagcaggtagcggaaccagatgaagacgccgatctggccgatgagcaggctgaggatggaagccatttccacaatgccgctggcgaaccccatgcgggaggtccccacgatgtccttgacgattccctttttggccgggctgaagacggtggcctgcacggcaaagacgcagaaccacaggatggccccgttcagattgtggacgtgcaggctccagtacatgcccgccagcacgcatatctggagcagggccatgaattggatgatgcgcgccttgcagaaacggtccgaaagccagccgacgaatggggagaacaggatgaagggcagcacgatgatggcccccagcgggtattccaggtccccctctgcgccgtacagccagacgcccaggggaatcagcaggaattgggcccctttttcattaaaggagttctgcgcctgaatcagcacgagccgccaaaaagctccccatggaactttgcgggcgtgtcctggcgtgtgggcgctggaattcatgaagttacaggctgggctcctccgctttttccaggccggagccgcggaacaggcacagcacgccgatgacggcggtcagcagggcgctggcaatcagggaggcttcttcactgaaaccgcacatttccgggctggagaacagatattggaatactaccaggctcaggaaggcggcgggggtcgccgccggccagcagcagcggtttttgctgcgcaggtaaatggaaacggcccagagcgtggcggcggccagcagctggttggcccagccgaagtactgccagatgacggcgtagtccatgctgctgacggcaatggccgcagcgaagagagggatggcgatcatcaggcggcggctcagctgttcctggctcagcttgaaactatccgcaatcatcaggcgtgtgacccgcagggcgccgtcccccgtgctgatggggaggatgaccacgccgatcatgaccaggatggaaccgacgcttcccatccaggattcggaaatcgtctggatggccagcgccggagcctttccgttggcggtagcccctcccagggcttccggagagccgtagaaggtcagcgcggcggcggcccatatgaaagcgatgatgccttccgtaatcatcgcccctccaaagacgggcagcccttcccgctccgttttcagacaccgcgccatcagcggggactgtgtggcatggaagccgctcacggctccgcaggcgatggtgatgaacatcacggggaaaagcgggaaatccgccggatggcggttatggaaaaagtccagatccggaagcacttccatgcggggcaggtgcatccaggccggcatgaaatccgcaacgggcgccaggagcattacgcccagaatgcccatgaccatgatgatcagggcgacggaaaaaagaggatagacctttcccatgatagcctggatgggaagaatggtcgccagaaaataatagccgaagataatccaaacccatgccgaaacgctccagcccgtcatgggggacaggatggcggcgggccccacggcgaagacgacgcccaccagcacgctgaatacgatgcagacggcgcggctgatccactgggcctggctgcccaggtagcgccccaggatttccggcaggttttcccccttgtgccgcagggaaatcatgccggagaagtagtcgtgcgccattccgcccagaatgcagccgaaaacgatccacagaagcgcggccggcccgtacagcacgcccatgacggcgccgaaaatgggccccagccctgcaatgttcagcagctggatgagaaaaacgcgccagcgcggcatgaccacataatccacgccgtccgtacaggccacggcgggagtttgcctggaggcgtccggacggaaaatcctttccagcacccgcccgtaagtgaaataaccggccgccaggaccaatatccccagaatgaaatagcagtaaccgttcatgttggaaaaagggccagccatctcatggacaggctgtccgttcatggaacttaacttttctcccgccttctggcaagccgttattgaaagagggaaaaatatggaacggattgccaatccggaagagaaatccaaaaagccttttttatgtataggaatttggcatcattagtcttacggcaacttgaaatcttcagggaagaagctcttcatttgaaaatatccctgcgcatttattcacctaaacatcttgttttttattatttattgttgacttcggattggcaatccgctaaagggaaaaagttgtttccactcaacatcattcagttatgaagaaaacattttctgtcattgtctctatccttgctcttgccggttccgcccatgcggctattgtatttgattatcaggcagatcctcaagtaacagctgatttttaccagcctgaagtcaccggagctttcctgaccggtcagacattcaccggcgttttaaaccaaaaaacgggttccaactacgttgactcctttttgagtcccaatgtaaatgtcggcaacgggaatacgtggagcgtttccttgtcctttaccgtaacggaagctgtcaccgttgattccatagttctgaatctttttacatttagtggtgccaatgcggttcagaatagtgaccggagaggcgcttatacctttaatttgaagctggatggagatgttctggccagctacagtaattccagcctgacttatctgggtacgggtgatgccagagccggcagttcccaacaggccagcgtggagacgctgggtcaacgcgaagggtcttccggcatccatgaggaaggaatgctgaaccaggcagtgaccctgtctgccggcaatacttatacccttgagctttccctgaacaggggacaggaaacgcagggatactttgtcggattgggcgctattgaattgaatacggttcctgagccggcgacagcctctctcagtattctgggcttggctgcactgatgatgcgccgccgcagacgttgaagtccatgtccctgatgcatttgttcaagccgtccgttttttctttgaaactggcggcttgttcattttcagccagtaaaattcagcattttttaacatttaatattaatacccggtatgattccccaggcagtccattcttcggcgtgatgccgtccgggtcatcgtttttccagtcagccatgttcccgcaccgtttttttactgttttcattcttttcctgctgttctttgctccagccggatatgccgatgttgaatatgtctggagaggcgctgattaccagtggagttccctgtccaactggagtgtcggaggcgttgccgccgcctccgcgccaggggccgccgcttccgcttatgaacattggatggtaaccaatggaacggattccgtagggagggcggatatcggcggattgggtgcgggggggcggtatttaaagggcgtcaggattgcggggcttaacagccgggcggaaagcaggattccattgttcatcaaaaacacgaataagaatgtatatttgcgtgtggaggagggcggcattgccgtggaaaatgccgacgggggcggttattctgcggatttcgggattgcccagctgcgcgttgccgcagaccaggagtggcatgtggctgaagggcgcagcctttatatagggcatgacgatgacgctccgtccgggggattgtattccctgacttcggagaacgatgttccgcgacgcgtgacagtgacgggcggaggcgccgtgcgcatcggggaaggggtgctgctgaataatatttccggcctcatcggttttgcggtgaacgccggaaagggaatacccacgctggatctggcggaccggggcatgagcaatacggtgacggtggaagacgctgcccgcctggaaggcatgtctctgtaccagggggctctgatgacgcgggaaaacgcgtccgtgactttttccggcactgcggtcaaggcatccggacaatggaacattggcgcggacacggaatttgcgttggagaattccacgctggatctgacggaagcgggtgtggacggcaacgtgattctttccggctcttccggcattaccggggataagggaacgctgcggcagacgcttctggatgatgcccgggtgacttatacgaaccggaatgtcaaggtgggagaaatccggagcgtaggcagcaatgtgacgataacgctgaataactcctccatgcattttgacggagaaataccggcggtggacctggtggtgcagggcagctgcgcgctgggcggcagcggcgccttttcaggaacgattacttatgcgccgggaggcaccctgactgtggatggggatatttccctgcccagttcatccctgacgctggggcgtctccatgtggctacgctggacggcgtgccgcaaaactccgccgtccggccggaaacccctgcccagcaggcaagggaatatgtggttttgtttgattcctcctttgaggatttgatttccgaatggccgggcaggcatacgctgggcgtgcagttccggccggatatgggcgtccccgtcaccgtaaaggaactgcctgaaggggcggtttcatggaattatgatgccgcatccggctggctgacgctgcagacggatgtagcggaaaagccggacatgccggcgcatgtttccggagccaggcccaacattatttttgtcctggtggatgacatgggctggggggatatgagcgtcaactggacgcagcaggataaaaacggcaggcaggtgacccgcaggaatgaattcaagacgcctacgctggacacgatggcggcggagggcatgcagctgaggcgccattacagtgcggctccggtatgcgctccggcccgcgcttccctgctgctgggcgttcaccaggggcattcccgggtggtgcgcaacaatacgtttgattaccctatcgagaattcccatacgctgggaacgctgctgaaaagcgcgggttaccatacggcggccatcggaaaatggggcgtgggcggaggcggacagagcggcaaggctctgaccgcggctccccacatgcgcgggtttgattatttttacggaatcatcaagcatttggcggggcattaccattatttgacggcgggttcccaggatatttacgaatataatgaccaggccgcggctccggcgtgggagagcgtcagcgcgaaagttccgggtaccgcctatgatacggatttgttcggggcccgcgccaaacagtggattgtggaccaccatgagaaaactccttcccggcctttcttcctgtatctggctttcccggctccccacggcagtctgtccgctcccgcctgtgcctatccggcggggctgggaagggacggcggcctccagtgggagaaaaaagacggctatgaagcctgcaataccgctgcggacggatggtcgggggtggagggggatttttctccggatacctatatctacccggaacatgaggtttttggaagaacggaatcccgccacgccacgatgattcgccgggtggatgacgtcctgaaggacatgatccagttgcttaaggatttgggcattgatgacaatacgatgattgtcttcacgtccgacaacggcccccacaatgaacccggttccggcaattacggcaacggcgcgcaggatcccgcgtatttcatgagctacgggatgatggacggcattaagcgcgattgctgggaaggcggcatgcgtgttccggccgtggtacgctggcccggtgtggttcccagcggaatcagtttgaatgccagccagttccaggactggatggctacttttgcggacgtggccggagtgcccgtgccgtcccgttgtgacggcgtttccctgctgcctacgctggcaggggtgccggaacgccagaaaacgggcgttatttatgcggaatatgcctatagcgggagcactccgaattacagcgatttcctccagcaacacagggggagagggcggcagcagcagcagattatatttgtggacggcttcaaggggattcggatggggaatgccgcccccgctacggattttgaaatctacgatacggaaaaagacccgcaggaagcggcgaatctggcggcatcccgtccggacctgcaggagaagatgaaggcgcaggcgctgcgttcccgccgttcctcccccattgcctccaccagttttgacgccggttatatcgcgcccgtttccgcccccgctggcctgcgggagggaaggctgcgctggcgcgcgtggaaccgttcttttgactgggtgccggatttccggcagctggaggaggggccctgttctacgggtgcgacggatgtttccgacgtgctcagcgtcaaggcggggctttccggtcagaagggggtggaattgacgggctatctcagggtgcctgtcaccggggaatatcaattttaccttcagacggattccaatgaaggctccagggcttttgtccatttgcacgatatgcagctcattgatgcggattatgcctatactcccggaacgcaggctgcctccaacgcgcgggaaggcgtttccggcgatgtgcagcccaatgccgttcagacggtgaagcttaccgcggggttgcatcccatccgcatcggctatgtggggaaggcggcttcctcctccctttccctgcaatgggaggggccggaaaccagcggcagggaacccgttcccgccagcgcgttttcctatgaatacgtgaatcccttcaatctggaaaagacggaggaaacggtaggatgcgccgcctccggtacggggctgaccgtgcagacgcatcttccctggacagtttcctgcgaccagccatgggttacggtttcccccgtttccggttccggaacctcagtgctggatattgccgtggaagcaaacgggctgcaaacggagcgggaagccgttgtcaccgtcgtatgcggcggggagcagaggacattcacgctgcgccaggaagctgctcctgccccggcagggtacgacaagtggaagcaggaccattttgcggatgggacgccggatgagcaaatggccccggatgcctgccccgccggagacggaatttccaatctgatgaaatatgctacgggcatggatcccaaccagccctgcgggagcgtgacgaagctggctgtccgcgaggaagcgggcgggaaatacctcgtgctttcctggcctgtgaatccggaggcgacggatgtgacgttccatgtggaaagttcttccgacctggaggaatgggctgacgaaggggccgtcactccggacggggcctgcggggaattccgcgatacggtcgcgctgggaaaaggctctccggagcgccggtttctgagattaaaggtgacgagatagggaatcaccggtttctctttccgtttcccgatgatgattccttacgggaacagggaccttccggccctgctgccttgccgcccgttacggattttttccggaagcgtgattctgcgtgttccggccctccgctgtcccggcgcatccagcgcggtacggccggggacaccgtgccttagccaggggaagaatattactccccgtcattttccgcatcggcagggggggctttgggcaggttcttgtcaatgtcttccagaaggttgaccaggtcaacgccgcgctgggcggagtcgtccagacggaaggtcaggcgcggcgtattgcgcagcaccacgcgcctggccacggcggactggataaggccgtgacgggagttcagtttttccagcacctgggagggagccattttccctacgacgcccacccatactttcccctctttcagatcgtccgtcacttccacttcaatcacggtgacgattgttccgggaaattcaaaatcccgctgaatggtggtgcctatttcccggcgcaggagttcgtttaccttgtcagtgcgtctgctcatatgaagggatagagtgatgaagggaccgattggttcaatcggagaaggaggaataagggaaaggacagggacggaggtttcctggacgcccggaggagcgtgcaaggagctccgtccctgttggatgatttttgttgggggttacagcgtttgctggattttttccagcgtgtagcattcgatgatgtcgcccgtttcgtattcgttgaagtctccgaggcggatgccgcattccagaccagccttgacttcttccacttcatcctggaagcggcggagggtggacattttaccgtcaaagacgggcgtcttgtcgcggatgacgcgcgcctcgcagctgcggaggattttcccgtcctccaccatgcagcctgccgcacggcccttgttgagcttgaagacctggagcactttggcgtggccgatgatggtttcgcgcgtttccggttccagaaggcccagcatggcatcccgcacctggtcaatgagttcgtaaacgatggaatacagttttacctgcacgccttcccgcttgagcagtttgacggcgttggcttccaccttgacgttgaagcccaggatgacggcgtccgaggaggaggccagcagaacgtccgattccgaaatggggccggcggaggcgttcaggaagacgcattccactttgtccgactggatgtccagaacagccttcctgatggcttccacggaaccctgcacatcccccttcaggagtattttgagctgggctttctgggtgccgtcccccatcatggcaagcagttcttccatgcgtgccttgcggggctgggccaggcgctgcttgcgcagttcctcctggcgttcttccccaagctttttggcggcgcgttcgttttccatttccaccagttcgtcccccacgttcggggtttcagagaagccggtgatttccacgggcatgccgggccctacctttttgacgcgttcgccgtggtcgttgaccagggcgcgcaccttgccggcgtaagggccgcagatgaagggcatcccaacgcggatggtgccgctttccacgatggccgtggcggagctgcccgtgccgggttccacgcgggcctcgatgatggaggcgcggcagttggccttgggattggcctggagttccagcacttctgactggaggacgagaaggccgagaaggtcgtcaatgccggctccggtcagggcggagacttccacgcattccacatcgcctccgaagtccgtgggaaccagcccttcttccatcaggccgctcttggtcttgacggggtctgcggccggaaggtcgcatttgttgatggctacgatgatggttttgccggctgccttggagtgggcgatggcttcccgcgtctggggcatgatgccgtcattggcggccaccaccagaaccacgatgtccgtgacgtctgcgccgcgggcgcgcatttccgtgaagatggcatggcccggcgtatccaggaaggtgagcgtgctgccgttgtagtcaaccgtataggcgccgatgtgctgggtaatgcccccggcttcccccttggccacgcgcgttttgcggatgtagtccagcagggatgttttaccgtggtccacatggcccatgacggtgatgatgggcgtgcgcgtgatgagggtggctttgggttcttccaccaccggcacgggttccggttccttgacgggttcctgctgggctttcacgccgccgcccttttcccgtttttcacgggcgaatgtgtagccgtggatgtcgcagatggaactgacggcgtccgcatccagcggcgtgttcgggttggcgaagatgcccatgcccatcagatccttgatgatttggaagggcttggctttcagcatgcccgccagctcggaaacggaaacgggcggcttgaggttgatgattttatcgtctgcggagggttcttcctggggtgcgggcgcggcgggttctgcggcggccggggcagcggcgggcgccggagcggcgtcagcggcgcgcgacgcttttttcttgttgccggaaagcaagtcgagagcttctttcttgactggagcagggcgggagggcgccggtgcgggggccggctggggtgcgcgtttctttttggaagatccgccgatcagatccaatacttcctttttgggttctttctcttcttgtttattaggcatcttgatttaaggttgttagatgttgagcgccgcgctcaacggttattgggagataaggtcccgtgccttgttcagaatttgggcggcttcctctgcgggaatgcccatgctttccgcgatgtcggaagcttcaaatccggtgagggctaccaggtccgttccgcccatggtcaccaggcccatggcggtttcttccgggatttccaattgttcgctgagggttttggccgcagcctggcattggcgcatgacttcttcggccgcagcctggctctggcgtttttccgcttcctggacgtcaaagacgcgcacctggacatcccagcccatcaggcgggaggtgaggcgggcattctggcccctgcggccgatggccttggagaggtctttgtcgtcctggacgataacgaagatttttctggcttcctcgtccacagtgatttcccgcggttccacggggctgagagcttcccggacgaaggtaacggggtcttccgtccattccaggatgtccactttttcattgttgagctcccggacgatgtttttgacgcgggcgccgcgcatgcctacgcatgcccctaccggatctactttgtcgtcatggctgatgacggccactttggtgcggtagccggcttcgcgggcgatgccgtggatttccacggtctggtcgcctatttccaccacttccgattcaaagaggcggcgcaccaggttcggatggctgcgggaaaggatgacttccgggccgcgtgcttccgtgcgcacttccaccacgtagaagcgcatgcggtcgccgacgctgtagtcttcattcggcacgcgttcgcgggaggtcatgacgccttcgaatttgccgaggtccacaaaaatatcccccttttcaaaacggcggatggtgcccgttaccagatctccggcgcggtccttgaactcgtcgtagagcatttccttttccgcatccagcagtttctggagcatggtctggcgggcggtctgcaccgcgatgcggccgaagcccttgggcgtgatgttggtggggagcaggtcgtgaagcacggcgtttttgtccagcttgacggccagggaaagggggatctggttgaatttgtcggaatattcttcatccggcaccacttccaggtccgcaaaaatacgcaccttgcccttgtccacgttgatttcggccctcaggtagttgatgctgccggaaccgggaaccattttgcggtaggcggagagaaaggcggactccagagcgaggagaattttttcacgggagagccctttttccctctcgtagtagtcaatcaaagctttaatatcgtttgtcatgagtgtggaggagtgtgatggatagacaaaaaagagcgggtcgacagacccactctcgagtgcctctcggggtgtttgcctatctaagtaagcacgagggggaggttctggcaagaaaaaacgcttgttctatgcggcatgcaaaagactggggatgattccggaagaagaattttccggagccctccgggagggggcgggacaacggtgtttgagggcttgacggacccgtcaaaaacgggaagtatgcgcgcatgaaactcgtctcatggaacgtgaacggattgcgggcggttctgggcaagggaatggcggacgccgtggatgccctggagccggacgtcctctgccttcaggagatcaaggcgcgtccggaacaggtgaaagacctgtggatttcctcctggccgcaccagctctggaatccggcggagaaggccggctattccggcgtgctgatcctcagccgggtgcggcctctttccacgtccgtcggaatcggctggccggagcatgaccgggaagggcgcgtctgcacgatggaattcgaggggttttacctggtcaactgctatacgcccaattcacagaatgaactggtgcgccttccgtaccgggagcagtgggacgccgcgttccgcgagtatgtggcgggactggcggaaaccaagccggtcgttttctgcggagacttgaacgtggcccatgaggagattgacattgcacgtcccaaagagaaccgtttttccgccgggttcagcgaccaggagcgcgccgggttcacgctgctgcttgaggccggttttacggatacgttccgcgccctgcatccggaggagccgggctggtacagctggtggtcctaccgcgcgggcgcccgcgcccggaatatcggatggcgcattgactatttctgcgtttccaatccgctggcttccagggtgaaggatgccgccatccatccggatgtgacggggtccgaccattgccccgtcagcctggagattgactgctgagcgcggtctttcagatgattttcaactgtaaaagattgatgattatggaacaggaattgccgctgctggtggttgccacgcgcaacgcccacaagaccggggaaatccgcgccatgctggccgggaaatgggaagtgaaggatctttccgactatccccaggctccgcccgtggatgaaacgggagtcacgtttacggagaacgccacgctcaaggcgctttccgcttccaaatgcatccccggcgtcctgctggcggatgattccgggctggaggtggatgtgctggacgggcgccccggagtctggtcctcctccttcggcggggaggaagggaaccatgcgcggaataacctccgcatgatggaggaactgcggcgcgccggcgtgaagccgggggacaggccttccgcgcggttccgctgcgtcatggtgcttgccgggaacggccgcgtgctggcggagttttccggttccgtggaaggctacatgttgacggagccggccggagaaggagggttcggctatgatccgctgtttgtcccggaagggtatgaccggagtttcgcccagcttcccatggaagtgaaaaattccatgtcgcaccgcgcccgcgctctggcgcaggtggtggagtggatgaaggaacgccgggcctgaggtttttcccgggcgcctggcggggggggaggtcagtccagcctgaaggcgcatatctggaagggtgccggtgttccggtgttcaggagctggtatttgccggcgcgccaggaatgatggggcaggcgggacaggaaggcttccacggcttccgcttcttcctttcctccttcgtggccgggatagcacatgacgctgagaagcccgttcggggcaatgagggcggcggcctgttccagcgcggccagggtgcattccgtcctggtgaccgtttttttgtccccgcccggcagatagcccaggttgaagacgatggccttcacggggcttctgaccagttccgccaggcggtcatggctggcaagatggagccggacggaaggggtgagcagcccttccttctccagacgctccctggtggcgcggatggcttcttcctgcacgtcaaaggcgtgcacctggccggaagggccagccagccgggccaggaaaaccgtatcatgcccgttgcccgccgtggcgtccacgactgcgtccccggggaagacgacacggctgatccagtcatgagcgcaggtcatggggcggctgagcagggaacatttcatgaccgggttgtacagaagctctgcctgtatgacaattcgtttatgaaattccggtgcgggaagaatgacaggttgttttttggcagggcatgtgttaggaagaggcataaaaccttctgcgtgttcccgcatgcggggataaaccacagacgttggcatgaagatgactgacagacgcacttttttgaaaaggactgccgccgcaggggcgctggcggccatatcggacatggattccctgttcgcccaggaggccggagctccggcggcttccggcattccggatctggtggccgtccgcaacggcacccgtgcggagatggtcaggaaggccgtggagacgctgggcggcatgcaggccttcgtcaagccgggccagaccgtcgtaatcaagccgaacatcggctggaacaaggctccggaattcggcgccaacacacatcctgaaaccgtcgccacgctggtggagctgtgcaggcaggccggagcgaaggaagtaagggtgtttgaccactgctgccacaacggcgcctatgagggcagcggcgtgaaagaggccgtagagaaggccggcggcgtaatggtggacggcggcaatgagagtcagtacgtgcagacggaaaacccgaaagcccggaaattcacctccgccaaggtgcataaggccgtgctggaggcggatgtttacatcacctgcccgcccctcaagcaccacagcggttccgagatgaccgcctgcatgaagaatgtcatgggcaccgtctgggaccgcggggccatgcataagaacgacctgcaccagtgcatcgcggatgccgtgtatttccgcaagccggacctgtgcgtgctggacgcttacatgcccatggtgcgcaatggccccgtggggaaggatacgaatgatctggtggagcgcaaaacccttctggcttcccgtgacatcgtggccattgacgctgcgggcgccgccctgctgaacaagaccggaaaaattcgccatgtgcagcttggggaggaaatggggctgggcgtcgccgacctttccaggcttcatatccgccgtatcagcatggcctgacgcggcggctccttctcccgtctgcggatgacgcggtggagggccaactttccgcctccggcgggtttatgataaatatgtcagtcatcaaagcctttctcgtcagtcctctgaagtggctccgcgtgacggtggccgtcattttctttattgggattgcatacgcttttctgcaccacattcccgcgtggaacgtgccgaacatgacggggggcggagagggggtggaagattccttttccctggcgcggtggcaattggtgccgtccgtgctggggaccttgagcggggccgccgtttccgtcgtgattctgggggttttgctgctgcttacgctgctgttcggccgcgtatactgttccttcatctgcccgctggggattctccaggatattgttttcagaatccgccgctggctggcgccgaagcgtttcctgaaattctcccggcctgtgccgtggatgcggtatggggtgctggcattgctggccgcctgctgcgtgacggggctggccggtctgtctctgaattggctggacccttacagcattttcgggcgcatcatgtatgtgctggcatggccggccgccatttggagcaataacctgctggcggcggacagttcttctgcggacctggttcaaatggattatttccccgcggctttcccggtattgctggcctccgccggcatgctcggcctggtggccgtcatgagcgcctggaaggggcgcctgtattgcaatacggtatgccccgtcggcacgttccttgggttgctttcccgtatctcccttttccggctgggctttgatcccgcctcctgcaaaaaatgcggcaaatgcgtcaaatcctgcaaggcgcaatgcctgaacctgaaggaatacaaaatagactcctcacgttgcgtggcgtgctacgattgcgtgcgctcctgcagtgagggaggaatacgctaccgctggtttaccagggtccgccaacagattccggcccaaaaaaagaaggttcccccggcttccgctccctcttcttccgccgcggttccctccattgccgggagttcccgccgccagttcctggaggctactgcggtcgggctggctgcggccgccttttccggatgccggggagatgccgcccggaagctggaccctacccagtgcgttcttcctcccggagccggttccctggaacgttttctggatatctgcaccggctgccagatgtgcgttgccaactgtcccacccatgtgcttcagccctcatacctgcagcttggcctgaagggattcatgaaaccccggatggattttgccaccaaatattgcctttatgattgccaccgctgtgcggaagtctgccccacgggggccatacgcaggatgcctgttaccgcggaaagggatactgagggaataacaaaagatactacgcgcattgccgtggcccggttttacgtttgccgctgcctggttgcccgggaggacatggattgcggagcctgtacggagcattgccccaccaaggccctttacacggtgccctatatcgggcgtgacggccaggagcaccgcctgcccaggctggatccttccctgtgcatcggctgcggcgcgtgcgaacacgcctgtcccgttaccgcggaacggcctgaggaacgcgaacgccggaactcctgcgatctgtgcgaggaaaaatgcgagttcggaaggcggcgggaaatgcccccccgggcgctggtggtccgtgccgtaaatccccagcagaaagctgttaaaaagtttgaggacaaagctgtggatccggtgggggatgcggattttccgttttaaaaacggctggcggtgtggaagatgatgaaataaacgctcccggaggcttcaaacttccctttcgggagggctgtgtctgtccatccggtttttcgggggaattccgtgcagcccggcttgcggcacggatacggccgcgggggatgccgaaatgagcgggggcaggaggagcctgaccgcgggagcgttcccgcggctggcggggaaggttcccggagagcatgttctccgtttccggcgggatagagtgcaaatgcccgattttccttgatgatgcggaagttgatacgttaaagtaaaagaaccatgttgcaggcgaacggcattacgtatgagatagaaacaccggatggtcctttgaaattattggacaatgtcagttttaatgtccctcgcggtcattttatggcggtcgttggtccttccggctgcggaaagacgaccttattgaaggcgattgcgggcatgattgcggaaacgggcgggcgttttttctggaatggccatgatttggctgaagaagactttgaaccttcggaaatcgggttcgttccccagttcagcattgcctatgaccagctgagcgtggatgagaatgtggagagcgccgccaggctccgttgccggttcaattccgtggacgatttggacgacagcattgacaatgccctggaggtaacgggaatggaggggattacggaccgggatgtgaaaattctttccggcggccagaaaaggcgactggcgctggccatggaactggtatccaatccccggctgctgatttgcgatgaggtgacgtccggactggatcccaggtcggaacacgatatcgtgttcctcctgcatgaaatctcccgttcggaaggccgcatcgtcatttccgtcacgcacagcctttcccatctggacaggtatgattccatcctggtcatgcaccagggctgcgtggcttaccacggttccccgaaaaccatgctgcattacttcggcgtttcctcgctggaggagatttacccgaagctccaggatcgtgaaggcccttcctggagccggtcctggagcaagcaccgggattcctattattcccgtctggaacaggaaagggaaaagaaaattctttccggggaactgccggatccggatgccgtccgtcttgcggaggcggagaaggagggggcctccggagaatccggaacggaacgggaaaaggccgtggaggaaaacattccggaagttcccggatttttcacccagttcttttgcctgctggggcggcgctggcgcatctttttccgcgaccgttcccagttggttcttcaattggtcatggtgctgctgtttcccgtgctggtagccatgtttacggacaagggctccgggcaaatcgtggggctttccgccacgcaggatgtccagactgtccagaaggatatggaagcccagcagctgaacatgaagacgggatccgccgtctccggcatcatcatgtttgaggtgattctgctggggctgatgggatccaacaatgccgcccgcgaggtggccggcgaacgcgccgtcatggaaaaggaaaagtatgcgggcatgaggccttccgcctacctggcgagcaagctgtcctatctgagcgtcctggtgctggtgcaatccgtctggatgtttgcctttgtggattttttctgggaccgtggcggcggcctgacgcatctgctgttcctgattttggcgaacgccgccatgacttttgtatgcctgggcatttccgccctggcccggagtgcggaccaggcttccctgctgagcatttatctggtgggtttccagcttcctctctccggagcggtgctggcgcttccggaatatgtggaggatttcatacggcccttcatttccgcgtattgggcgtggtccggcagcatctccgccctgaaggacgacgtatatcacgccgtcaagaatgtgctggatacggacctgacgccctccctggtttgttatattgttctgggcgtgcatgttgcgtgcggcattgcggccgcctacgcgggaatccgccgttcgcgctgggagctttaatttaatgcgtgcatttgcgggaagtccgttatatacttcttccatcaaaaattatgtcgagacggcgtgcagcaaaaaagaaaaattcctcatcatccgcactggttttgacggtcggggcggcggtttttgtgctggccgttattgtggggattgtcatgttccgagccggggagaagcctcaggccgggtcggatatacctctggatattctggcggcgaacgcctcccagctttccaataacaactatgcactggacggaacggtgactgaccgttttccgcgcggcgagtccgagcttattgccttcttgtacaaagacgcctccgggcgtgagtgcatcattcccgtctgtatttctgctgaggccaggaacggactgaacatcaaccgggaccagcaatacaggatagagttccgggtggaagacgtcaatccgaaggtgcgcggcgtgtgcgtagctacatccattcagcctaaataaacaatctccctcgtcctatgaaatgctgttttttgatgactctggcctgcgcggttcctgcgctggggcagatgatgtacaaccctcctgcagccggcggtgcgcctgccgcgcctcctgcctcccctcccgccgttcagccgaatgcctaccagccttccaggcagggggatgccaagtccctgtacggcaatgagctgcctttcctgaaccctcaggacggcacggtgaccatcaacggaacgacgttgaatatgggcagtttccgggagattgaagcgcgtttcaacaaatacctgagccagccggaggagagcacggaagatgcgaaggaatatcagaaaatttttgaaaagctccacgaaacgctctccatgcgcaaggaaaaactggcggcggataatgtggtgcggcaggtagtggacctgttgaccgccgcttccagcaatccgctggacggaggcgtttccgacgctctctgccaggccatttacaccgcgtggcaggccaggagcaatgggaaaaacaaggggaagatgcttgaggcggtggagagggaaatccgcagcaacgcccagaagatgagcctgatggaaagcggcgtgacggcgatttccggtgcaccctccggccagaagggcgggaaaaaggggactccctccaatcatccggcgaaaaataatccccgttacaaatacctggaaaagcgtgtggtggagatggaagcccgcaagctgaagctggagagtgaacaggtgctgacggtgacggaagcgaaagttgttttccagtctacgctggttcaattgtttgcccagcggcgttttgaccatgtttccataggctgcggcgtttacagccgcctgttcaatgacggggataccaagctgcggctggataaaaattccgatgccgccaagatgttcagcggcacgctgggcgctccgcccaccgtcgctattctggacaatctttcccgggagctggcccgtgactccgaccggcacatgaaggccgtgaacaatctggtggattcccgtcattatgtggatgcgctggaacggctgaacgaagcccttctgatcggggaattcatgcctgccgtaaatacgtttccgtatgagaagaagcaaaagctgtatgccttcaagcgggacgtggaaaagttgttcgagctgatgaacggcaaagattatgaagaagccctttccctggtggaggctcttaagaagacttccagggatttcagcacgggccgtgcggaatccgcaatcagcgccgccgtattcgccagtgacgcctatatttcccagggtcaggaagccctggccaggggtgaccgcgccaaactggaggaatgcctgaaaagcgccattgaaatctggccgaaaaacccccgccttcttccgctgcggaacgccatgatggccgcgggtcagcaatcccatgcgctggaggatttcaaacgtttccacaagagtaagaattatcgccgcatctttgacaaccagcatgaatttgccgttctggtgaaggatgatccggagctccagaagcagtttgtggaagatttgggcaaaatggccgttattgagcgtgccctgggcgcggcgcgtcagcgtgaagccatgcaggacgtatacggcgcctgggaggagcttcagcagctgcgttccaaagaccaggagctgttcatcaatgaccaggagctaaacgccaggtatctggacctgacgacaaaggcaagcacgctggtgaatttgctgaatgatgcggaaaaatgcaggaatgagggagaagtggggtccgccctgggcaagtacatggaagctaaaaggctgtatctgtattcccggtttgccaaggagggaattgagtccctgcttgatgaaattttccgttgaactggacggataaattccgccgcatggcgtgcctgtggagacggagtaattgcttttcttccggaacggtgccgttatgctacggctcatgaaggcagtatacctgtgtttgtgcatgctggcggcgttttgttttccggctgcggctcttccggcggattgcagccaggtgattgtaggttccacggacgggtggaatagttcccatgtgcagttgagccttttggagaaagggccgcgcggctgggtgatggtgaagggtccgtttccggcgcgtctgggaaaatccgggctggtctggggcaggggcgtcagcctccctcccgccggagggccggtgaagaaggagggggacttgcgttctcccgcgggcatttttgaactgggaggcgtatatggaaccgtccccgcgccgcagaaaaagcgttccatgccgtaccgccgcattacgccgcgggacatgtgggtggatgaccctgcctctcccctgtataaccagcactttgtactgaagcatgatcccgtgacgccgtgggagttcaagcagcagatgaagctgaatgattacgcccacagtctgaaactgtttatccggcataatgccgcagacggacggcggaaacccgtgccgggtgcgggttcctccatttttttccatatctggcgccgggacggaggagctcctacggccggatgcaccgcaatgagcgaggaaaatttgagggccatgattgcatggctggatccttccagacatcccctttatattctgctccccgccagggaatatttgcgcctgcgcagagcctgggggctgccgtgatattttcagaatccgcctttgcaggcacgcctgttccgccgccccgggacggacaggggagtggttgaaacactacggatggaagggctggtggatggtgcggctcccgtgccgtgctgcacgttcgttgctgccaggagttccctttcccgtaaatgcaggaagccggcctttgaagaaaggccggcttccgcatggtaaaatggttattgttcctgggactggggagcgggagcttccggctggagcaggggagtggaggtttccttcacttccgccatggaaccctgttcttccctgggtgcgcggtcttcgcggggctgacggggttgttcctggcgttcattggctccgctgaccagcagattgcggcccatgaaaggctggttgtggagaatgtccacggaacggatggcgtcttccatcttcttcatttccacaaaagcataccccttggacttgtgggtgcgggggttgtaaatgatttccacggaattgacttccccgatgcccttgaacacgtcctccagatcgctttccgtagcttcataggaaagattgcccacataaagccgacggttggagacgggctgtttgggtgcggaaacgcgatcctgcctgttgcgggctacgcgggtgttggttttggcggcggctttatccctggccgcatacttgttattcttggacggacgaatgccgaagaggcccaggaaacgctgccacaaggagagtttggcgggcgcttcttttctgtacttgggacggtaaccgctggaatcgcggcggtcattgccataggagcgtccgcccttgttgtagcggcggcgagctccctggccctgtcttccctgtgtgttgtgttgtgacatacttatatgctaagttggtgattatgttggtgtcatgccggatttatcgctgtgtgcagtaaattccatccggaggatcgccgggacgttccgctgccatgagaaaagccaggagtaagggggccccatgccccgatcaacggtccatgcatggtctgataggggggcgatcaggctaggcgcgtgaccagtccggtcgattgacgcgtataccaatgcacagggagccggattcttgcaagccggtatctcgtcattttaggctttctgctcgcccggaggcgggaaggccgtccgggaggcaggcttccgtgccgggcatggctcagagtgagcaaacaatttgacaaaaagacaaggacggagcattttaaatgccggctaatctacatattctctcgatgctgattcaaaatgcagaccgtactacctacgggattaataagattgttgttttcgtccttgcgttcgtcgtcttcttcgttgtcggatttgtgtcctggcaatgggatggggtcgctccggaaccgtggcgtctgcggacgctggtgctgacgccgctgacgatgtctctgctgctgtatgtgtgctgtgaccagttcggcgtttactaccgctgccagacgctctgggaaagcatccggcggtttgtggtggcatatgcctgttttgtggtgttaagcgtgatgatatggaagttctttgttcccttctccgcggatgtcggtgtccagaccctggcgtatctgcttacctttctgggttccctctggctgcgtatcagccggttccgggcggaaaaaaggctggtggaggaagcccctacgctggtggtgggaactccggatcatgtgaaagaattccgcaggacgctggagaacaatcatgtggacttcaggaatgggctgctggtcatggcgcctgaagagctggacagtgcggtagtcaggaatttgttgattaagaattgcgtcagcaaggtggtgtttctgccggaggaggtggattcttccgtggcgcggtgcctggtggaactgtgcggcaagatgggagtcgatttttacgcgagcatggtggtaagcatgcccgctgtgcataaaacctatttcggcgtgattggaggaacaagaatgctggtgtacaaatccacccccattccctataccacctcctggcagttgaagaaaatgctggactggacgggagcgctggcgcttctggtgggaacgtcacccctgtgggtgctggcggctgtgggaatcaagctgtcggatcgtggcccggtcttttaccgccagaaacgttccgggctgtatggtcaggagtttggcatgtggaagttccgcaccatgtactgggacgcggataagaggctggatgaagtgaaagccaagtacggcaatgacatggacggccctatctttaagctggagcacgaccctcgcatcttctcctttgggcgcttcctgcgcaaattcagcatcgacgagcttccccagctcattaatgtgctgaagggggaaatgagcctggttggcccgcgcccgctgcccgtttatgagacggaagcctttaccagcgacgcccaccgccgcaggttgagcgtgctgcccggtgtgacgggatactggcagattgccggacgcagcaacatccgggaatttgaaaagctggtggaattggatatgaagtatattgacaactggtccctgtggctggatatcaaactgcttctgaaaaccgtcccggcagtgcttttcgcccgtggggcaaaatagcttccaggtctccctggattgcaggccgtcagccgttattgccgggaatttggaatctggctggggttctctgtccggtggaacaggcctgttttaagaatactgcaattcgggagggggatgaaattggtgtattttgtggaaaatgaagaaaattattgccgggcagagactttaatcttgaggtgcggaaagggatggggcagaatcaatctattatggatttagttcagcgagaaatctctaaagaaacggtgactccgtatttcatcgagtatttcggtcaggcgcctactcatgtggcagcggcaccgggacgtgtgaaccttattggtgagcacacggattataataacggttttgtgatgcctatggcgcttgataaccattgtgttgtggctgtggctccctcccccgtgggcaaacaccgcttttgcggttccctgggtgaccagatccatgaaattgcggtggaagatgccttggttcccggcgaaccgttctggtccaattatgtccgcggcgttttggccaacctgcacaggcgcggcatagaaatcgggcctgtggatatgctgattgacagcaatgtgccccgcggcggcggcctctcctccagtgccgctcttgaagttgccgtctgtacggcgctcgccgcttttgccggcgttgaaatagatcccaaggaagtagccctgatcgggcaggccgtggaacatgaattcgtgaacgttccctgcggcatcatggaccagtttatttctgccaacggcaagaagggcatggctctcaagctggattgcgccacgctggaatatgagctggttccgatgaacaatgagtccgtctccgtgctggttctggacagcgctgtgaagcattccctggcggacggagcttatggacagcgccgcaagcagtgtgaggaagcttcttccatcatgggcgtgccctccctgcgggaagctacgctggagctgttggaatccttcagggaacagcttggcgatgtgcgctatcgccgcgcccgccacgtcattggagaaaatgcgcgcgtgaacgcttttgcgaacgcccttgcccgcggcgattgggatgaggccggtgtagccatgcgcggcagccatgcttccctgcgtgacgactatgaagtttcctgtgctgaggtggatacccttgtttccctttgtgaccgcattccctccgcatcctccatttacggcgcgcgcatgacgggcggcgggtttggcggatgcattgtggccctggtgaagacggaggacgtggaaaaggtggcccaggagcttctggacagctactgccaggaaacgggcattgaaactacgtatcttgtaacccgtgccggagaaggcgcccgtattctgtaccaagcttaatccatactgatgatgaaaacactagcaactatattcggggcgctcgccctgatgacgtggggcgcatccgcccaggaggggcccgtgcctgcaacggcagctgatgcgcagcccgccctggccgctccggccgcgactcccgctgttgaagtccagccggcagcggaaattcagccggcggctcccgctgcagaggctgtacagaccgcctctgcggagcctaaaacggcccctctttccatggtggaagtcattctcttctgcgtggtcgtggtgggcgtaatcgccctgggcatctggaaaagccgtgaccccgaagaaacggaagaggaaaagaaggccaagggcgcttcagactatttcttggccggccgcggtctgacctggtggctggtgggtttttccctgattgccgccaacatttccacggaacagtttgtggggatgtccggcaaatcggccaactgggtgggcatggccatcgccgggtatgaatggctggccgcaatcacgctggtggttgtagccttctgtttccttcccaagctgctgaaaggcggcgtatatacgattcccgaattcctggaataccggtataacacgctggcccgttccctgatggccattgccacgctgctgattctggtaggcgtgccgactgcgggcgtgatttacgccggcgccaaggtgatctccgtgttcttcacgggatactctgccatgggcattgacttcggcaacatcaccgtcggctgcgttatcattgccttctgcgccacggtatacgtgttcgtgggcgggttgaaagcctgcgcctggacggacctgttctggggcgccgccctgattgtgggcggcggcgtggtagcctattttgccctgacggagctcagcggcgcagacccgaaccatttgattcaatccgccgccgccaattccggcgcgacggttgcctccctggggaatccttcggacagcctctggcatggggtgacgcgcttttttgagctgaactccggtgacgcggccagcggtgtaaataccgtgggcggcaagctgcacatgatccgtcctgcggatgatgcggaaatcccgtggacggctctttgcctgggcctgtggattcccaacttcttttactggggcctcaaccagtacatcatgcagcgtacgctggcttccaaatccctggcggaaggtcagatgggcattgtgttcgccgcgttcctcaagctcatcatcccattcgtggtggtggtccccggcatcctggcctataacctgtaccgcaatgacctgaaggaacaggcggaagtaaaatatgcggcggaaatccgtaagacggaagatcccgccgcagtcaagggccgccccgtcatctacaagcttacggacagcttcctggtggaaaacgtggaggaaggctgtgcccatgccattcataacgcggaagtaatgaaggtgggcgaagatgttatggccaatttgaaacaggcctgcgccgatttgaaagcggatgccgccaacgaccagaccacgttagcggaacgtgccccgttcgtggaaaaaatcgcttcccttaacaataaaatcatcaagccggccgtggacaactcggacaactactatctgacggatacgctggtaggctttgactatgactctgccttcggcacgctgatcaggaagttgcttcccggcacgggatggacatggtttgtgcttgcggctctctttggcgcggtggtgtcttccctggcatccatgctgaattccgcgtccaccatctttacgatggatatttacaacaagctgcgcaaaaatgcggggcccacggagctggttaccgtcggcaagattggtttgctggtgtgcgccgtgatcgccctgaccattgctccgttcctggacagcccggcctttggcggcatcttcaatttcattcaggaattccagggcttcctgagcccgggcgccctgtgcgtgttcctcttcggcttctttgtgcccaagtgcccgcgcatcttcggttggctgggtatcgtcattaatgccctcctgtacggaatcctgaaggtgtggcagccggaaatggccttcctgaaccgcatggccgtgtgtttcatcacggtagtggtcatcggcttcatcttcacggcggtgaacgccgcccgcggcggacagcctatcgtgctgcccgacaggggcgtggttgcccttcagtcctcttcacgggctaaaatcttcggatggctcgtggttgccgcgacggttaccctgtacatcatcttctggtaatccagggaagacctccagtcccgtattttcaatcctcccggttcaggccgggaggatttttcacgtccggaacagaccatgcagctggcgcggctgaatattctggaggcggaaagtcggcagactggcgtttccgggcggcaacggcgccttgtcctctgaataaagttaaagtaaaagacatggttgaaaagaggctggcaaaacgccatgccgcctcttattcctcttccagaagcatgctgcgcagggaatcgaaaaagtttccggattcctcttccgtcgcttccgcgttcatgagatcctcccatttggaatattccatcaggtggggaggaatttcactgaggaaggaggagcgctggcaaggcatgcggtccccgtaacgcaggcgcgtggcgcaataagtaagcatgagtttctcctgggcgcgcgtgatgcctacgtagagcaggcggcgttcttcatcgcaattgccgtcttccagggaacgcttgtggggaaggatgccttcctccagccccacgaggtacactaccggaaattccagtcccttggcggcgtgcatggtaatcaggcatacgcctggcttgttttccacgtcgtcatcgttatcttccttgtccagggtgacctgggccaggtagtcccggagagtttttccgggttgccagaagttgcggagggaggctttcacgtccccgatggacaccagccgtttctggatttcagcttccgttttgcacaggcgcgtgacgtattcgctgaatccggtttcctcaataagctgctccaggatgtctccgaagtcggtttccttatcctggaaaaggtcgatgtattttgcaatcagttcattgaatgcctgcacgctgttgcgggcgcgggtggaaagggccgccaggaattcttcgtcctggagggctgcccagacgctgttgccgtgctcccggctccagtcgatggccagatggctggtcagctcgctgatgccgcgcggcggcgtgttgaggatgcgcagcagatattcgtcagcctgcgggttttcgatagtcgccagataggaaatgaggtcctttacctccttgcggtcgaaaaaactttgcgcgcccaccatgcggtagggaattttgtgttcccggagcgtttgttcaatgatgcggctctgggtattggcccggaacagaatggcgaaatcctcccagggccggccttcctgcctgcggacgttttcaatgtccgtgatgatgaattccgcttcttccgcgtctccgggcatggaaatgagccggacggcttctcctccgcctttatgggcgcgcagcgtcttgtccctccggcccaggttatggcggatcagggcattggccgtgtccaggatgggggcggtgcagcggtaattttcttccagtttgatgatggagggatttggaaaaaaacgttcgaattccaggatattgctgatctgggccccgcgccagccgtagatggactggtcgtcgtcccccactacgcagacattgtgttccggccccaccagatggcccagcaggctcatttggaggctgttggtatcctggaattcatccacggtgatatagcggaagcgctgttgccacgcttccctgacgtcccggtgctccttcagcaatttgtccgccagaatcagcaggtcgtcaaaatccacggaattctgcgcctgaagttcccgctggtaggaggcggcgatgttggccgtcaggttgtcttcaatggagtcaaggcccagaccgctgtttttcatccggctcatggaggaaagcacatccttgggcgtgattttctccgtaatgccgccgtggcgcacaatcagtcgccggatcaggccgctttgttcggaaccgctgtaaatggtgaaattggtcttgtaccccaggcgccctatatcctctctcaggatgcgcacgcagagggaatggaaagtgctcaccattatttggcgcgccgccttgcgttccaccatctggcctacgcgttcccgcatttccagagcggccttgtttgtgaacgtcacggccaggatgcttttggggctgataccccggtccaccatatgggcgatgcggcaggtgacggtgcgcgttttacccgttccggccccggccaggatcagcacgggcccctgcagggtctgcacggctttcctctgggccgcgttcaggctctccatggaaaaggacttggccatttatacgtcaaaatggatatctttcaaattcgggtggccggcaatgagctgggagatattcatgcgcgtgctgccttcaagctggacgtctgtcaccagcaatcctccgcttccgcaggcgatcaaaagaccctgttccccggcggagagcacctggcccggttttccctccgcttccgggaggatggaaaagccggggaaaattttcatgttgcggatgcgtttcttgcggttccagtagttggtgaaggtcccgggccacgggtcgtacgcccggatcatgcggccgatttcttctgcggggcgcgtccagtcgatttttccgtccgcccgcaggagcttgggggcgtatgttgccaggatttcctgctggcggatgcgtgtagccgttcctttttcaatggaatggatgacgggcagcagcacatccggcgtcatcctggccagcttgtcatgcagggaacctccggtttccgtgccttccaggggggtgctgatctgggcgatgatgtctccggcatccagcttcctgacaatgtgcatgatggtgatgcccgtttctgcatcgccggatttgatggcggactggatgcaggccgctccgcgatggcgcggcaggagggaggcatgggcgttgatgcagcccatgggggccatatcaatcacttcctggctcagaatctgcccgtacgccatgacgacgattagatccggattcagtctcctgaggttgctcagcgcatccgggctgcgcagggaatgcggctggagcacgggaatgcccgcttccctggcaatatttttgatggccggggctgtaagcacctggtgcctgccgacagggcggtcgggttgcgtgaccaggcctgccagatccgaatgacggatcaggctgcggaaggcgggaatggcaatgtcgcctgtgcccatgaagacgatgcgcatggctggaagcttgccctgacggcctgcgcaggtcaatgttaaatccggttttgagaagggaatcatagggaagaaaggccgtttttttccgttcctttccgtccggagggaataccggaggataatgtttttccggccgcttcccctcatgtctgccctcctgcaagaagttcttttcgatggaacggaatattggtataccctgttctatgcagaaaggacggctgccgcgcattctgattgtgaccgcaggatacggggaagggcacaattccgccgccaggggcgtgagggatgctctcgcagggcgcgcggaagtcctcgttacggacctgtgcgcggaggcgatgccccggatgtttggcctgacgcgcgccgcctacctgtggatgatttcccgcatgccccgcctctggaaactgatgtatgaggtgagcgacaggcgcaatatggcggaaaagcccgtcaggggaatcgcccccgtggagcgcctgctggaacgtttgctgcgggaatggaagccggatgccgtggtctgcacctacatggtatatccctacatgctggattccctggcctcccgcacgggcagggcagtcccctacctgaccgtcgtgacggattccttcgtcatcaataaatcatggctgtgttccaagtcccctctctgggccgtaacggatccctggacgagggccatcatggaggaaaaggggctgccgcaggacaggctgcgcgttacgggatttcccgtcaatcccgtgctgggggcgttggcgaaggagcatcctctttcctggaaggaaggggagccgttccgggtgctttactttgcccagcgttccgcacggcatgcgcgggcggagctggcgggtatgctggatgcgaatcccgccctgcatgtaacctgtattctggggcgccggttccggcgcatttatccccgcatccgggatttgcgagccagatacggacgcaggctgacggtgcgcggctggacgcgccgcgtgccttcctatcttgccgccagccatgtagtggtcgggaaagcgggaggcgccaccgtgcacgaagtgcttgcggccgcacggcccatgctggtgaactttcttcttccgggccaggaggagggcaatacccgccttctggaaaaactgggcggcggcggccatgtgccggatgtccgcgccctggcttccgctcttcaggaaatgatggcggacggcggcgcgcagtggaggcgcatgcatgaaaacctgctgcgggcggggatgaccggaggaagcggcagaatagcggatttggccttgaaactggcggaggaacatactaactgattcccgtgacctatcttctgattgacaattccaacacgcgcaccaagttcgtgctttcttcgccggaagccctgttgccggagcggtatatgattcccacccgggaggtgagcggggagcggctggacgaggtgctggccggcgtccgttatgatgccgccgtggtgtgttccgttgtgccgcgcgtggcggaagagctgaaaaactggatcgtcaaaccgtgccatttcctttcctgcgattcccggctgggcgtgggcatcgactatccccacccgcgccagataggggccgacaggctggcgaacgccgtaggcgccgcggcttattacgggtatccgtgcgttgtggtggacttcggcaccgccgtgacttttgacgtgatcggtccccaatgcacctatgtgggcggcgtcattgccccggggcttgccagcatgggggattacctggagcgcaatacggcgcttcttcccgctattgacccccaggagccgtcccgcgtcattggaaccagcacagtagaggccatgcaatccggcgccgtgtacggttaccgggggctggtgaaggaaattctggcccggctggaaggtgagctgggcgtgcgtccggccgtggttgctacgggaggggatgcagcgctgatcgccaggggcgtggagcgcattgaccatgtggaccctgacattacgttgaacggcttgcgcatagccgccgggctgaatctttaaagaacggccaaaatcggctggaaacctgctgcttccggcgccgtggccggatgacgcgtaaaaactcataaataggtgttgcaaatggcgcataccccatgtaatatcaatgaaccttaacaataaatatcatgtctgacaacagcatcgaagaaaaagtaagaagtatcatcgtcgaccaacttggcgttgaatccgataaagtgactgctgatgcgaaattcatcgaggatctcggtgctgattcgctggataccgttgaactcgtgatggctttcgaagaaaactttgacattgaagtgcccgatgaagaagctgaaaagcttcagtctgtggccgacgtcgttgcttacatcgaaaaggttcagggttaagttaaactgctaaaaatcctttattacaaaagcggcttccctgtccaaggcaaggaagccgctttttcatggaaagcctttccgccttttcttccatgagcgacctgccttccttttcccgtgacgatatccgctatgcggcggagatgacacgggtggtgtatgaaccggaccgccgcattgatacttttggcgataccaggtttaattttcttctcctcagcgaactgatggatgaggtgaacgtggtgcgcgtgcgcagcggctgggtggaagcggagaaaccgaaaatcatacggccttccatttacaatgaaatcagtacggaggggttttccggagaagccaagcgcttttttgactggctctccaaaaacggcccgggctttctgacgctgctggaatacggattcaggttcaaacggtcggaggtgagcgaggaaattctgcatgaaccgcttgattccgtgcgcggtcggctgctggaccaggtgcgcaatggagaagatacattcatgtctctcattgagggagtggatgacgcatgggaggtctccctcttgaaattcacggtggaaatgatacaaaaatcccatgaaatcaatatctttgacttcaagcgcaaaggtcttctttagccttttggcggcggctttctgtgctcagggagttttggcggacggagaaaattattccctctggccgcgccgtccggaggcccttgctgaagcccgccgcctgatggaccgcggcagcctgccgaaagctctggaactgttgcagcctctggcggaacagggcggcgtggtggggaaagaggcgaaggaactcatcgggaggctgcgcatccgccagttgctggatcccaatgggccggatgtgaagaaatataccgtgcggaagggagattcctggatacgcatggtcaggaagctgggttgctcccaggccatggtggttcatctgaacggtttgatggatattcccgctcttcacacaggagatgtgttcaagtaccggcccctggattttcacgtggtggtgaacgtgccggaaaaggaaatctgcctttacgacgggacggattttgtcaagggataccccatcctctccatgaaggacggggggaaaaagaatgtggaaacgaccgtaaaggatgagcaggcccccgtgtccatctacagcaggcagtttccttctgcggataagacgctggtgctggcggcgggaggctatgtcattgacgctgcccgcggtacgccccgctcgcctgggttttatctgagccggcaggactgcaatgaactggccatgctgaccaggccgggaacgaaggtgactatcctgagggggaaaggagaggaaccgtgaggctggttattcagcgtgtcagtaaggccgccgttcatatcggcggtgtttgtgcgggggccgtggggtccggtctgctgattctggcgggcattgaagaggcggatacggaagaagatgtgcgctggctcgccaacaaggcggcggccatgcgcattttttccgacgcggacggaaagatgaatctttccgtaagggaagtgagtggaagcgtgttggtggtgagccagtttacgctgcatgcctccacccggaaagggaacaggccctctttcatccgcgccgcgaggcctgagcgggccattcccctgtatgagctgtttaagaaggaattggcgtctttgctggaaggcagggtggaaagcggcgaattcggagcggatatgcaggtttccctgattaacgacggtccggtgaccattttcatggactccaggaaaagagagtgatgggaagggtctttatgaacaccatcaaaaaggcttatatagttagctttaccccgatctcctgcttgctctctattttcgtatgaacatagaaagtattgatgataaatctgttgctcctcctgaagatctgtccttgaaaaaggaggaatattacatttacgtagattcgaacctggccctgaaataactaaggccggacgctcctctggctggtcgatatttcccgtggaagccgcctgtccatagggcgagtaatcgtaagccgctgcgacatttccctgtgcgtcgaacacctccgtcacattcttgttgaagtccatgccatagcagtaaagggaagcgtcctgcgcgagggccagggggcgggtggccatcggttccagaggatcccacaacagtgtccggagcacgttccggctgttgagcatgtccagggcggctatctgcaaatagcctcggtacaggtagcgttcatggctggtgaccgttccattttgggtgactttcttcatgtaccttcgtccctgatagtcgtagccgcattccacgactgtcgcgccgtcccggctggtgaagctcaccgcgcggttggccgcgttgtagaccacggtccacacgcccgttgacgtcttgatgagggtctggttgcccgaggcgtcgtacgtcggcacaaaaggcgcttccccgctttcttcaatgccggtgtactggttgagcccgttggccgcgtaggcgagttctccggccggttcccgtgccgtcttgcggttgccgatgttgtcgtagctgtagccgtaggggtcggcgcccagggtggcggcggtgagttcgtttctgccgttgtagctgaagctgtcgctgcgggcgggttccgttccacgctgctgggtgcgggtgaccgggcgtcccagggcatcgcagctctgggtccgggagacgaacacggtttcccccaggcggcagttgattgccgtgaccaggttgcggcgctgttcataggcaagttctctgatgatgccgtcgggcatcgcaaggctggagagcaggctgcttcccgccaggtagccgtaggcgaagcgttgctccgttcccccgtgcctgattccggcgctggccagccttccgtcggcttcatagccctggctggcttcctggaggacaccggttccctgtttcagggtatagccggaggagcgtccgtaagtgtcgtagtgttcctggagctggtaagagctccctccgatggtgatgctgtcggtgtccggttcgttgcagggggtgtacgtgaggacgcgcgagccggaggcgtccgtgacctgggtcagctggttgaggtagttgtaggcgtactggataccgggcgtggagtcgctgtaggagacggagttgttgaccccctttttcaggttgtagccccaggtggtgaccaccccccgcgcgtccgtgagcgtggatttgaagttcagggcattgtaggcggtgtcttcatgggtgccgtccgcccaggttttgcggatgagcaggcccgtggcgtcatcgtagctccacgtagtgacgtccccgtccgtgcgtcccgtggggtcggcggtgatgtcgcccgcgtcctcccggaacgtggtgaggcttatcatcctgtccgcttcatcatagccgaagagcaggggctgggtccccgttccccattgcgccgtgttgcggccccggaggtcgtagccgtagcaggtcgtgttgcccagggcgttggtgacgacggcaggctggtcaaaccaggggccgtaggcggtagaagtcgtgttgcccgccgcgtccgtcaccgagatcgtgcgcccggcaaggtcggtgcgcgtcgtgaccgtgttgccccggccgtccgtgctggagtagatgacgccggtttccgtgtaggcgcgggtatgcgtggccgtgacgcccgcatggtccgtctgcgacgcggtgaacccgtcaatgaccgtggccgttgctatgacattggaagtgggaatgctgcttttctgcgtccggacggcgcccgggccgtattcgctccattgttcggaagcgtttcccctggggtcgatggaaatgactttgctttccagcgtggacgagagggaagaaagaagcgttttctgcgtttcgtcgcaggtcgttccccggccgttgttcctggtcgccgtgacgacctggtacacgccgtcttccgactgttccgtgccgtagctccacgcggtgatgcgcgagttggacacggtggccggatcggccagcttccaggtttcttttgttctgttgccgaaggcgtcgtattcccacagggtcggggccatcgtcgtggccgcattgcctgcgtccgtctgcgttttggtgagctgccccctggcgttgtaggtgttcctcgtgtaaatgactccgccgacggtgttggggacgcccgtgcgcagggtttccccggctccgttgacaatgctgcgctgcagctcggtttgcgtttccccggagacggctttcgtgaaggtcctcacaccgtcgctgaccaggtcgatggcgtagatgacgtgccgctgccccgtgccggattcttccatcaccgttccgtccggcgcgctgcgcgtgatgaatgtagccccggaagggacggtttgcgtgaccgtcaagccgtcctggctgtaggcgtaggtagtgacccggcccaggacgtccgtagaggaagtcattctccccagcaagtcgtactccgtgctttcttgggtagtcatcgcccccgtgtcttgacgcgtggagagcacgcgccctgccgcatcccgggcgtaggtggtgatggtttccggcgtgatgacggtttccccgtccatcacggcggaacgcgtgacttccaccagttggcgcgccgtgtcgtaggagtagtccgtcctgatgccgttttcatcgatttcccacagcaggcctccgtcgcacatcagttcgcgttccgtgagccggccgttgcccgccgtccgcttcacccaccggttctgcgtgtcaaattcgtagacggcgctgcccgtgagcgcccattgcccggtggaaagcaggaggtagttttcttccctgacgcgctgcccttccgccgtgatccaggtgacggcgcgcgtgctttgtcccggcacggcttctccgctgatgcgcgtttccaccgtttccgtgtagagggcgccgtgctccgtcgtggccgcgtagtcgtgccacgtttgcacgccgtcgaggtcccggctgaaccgcgtgcgtccgcgggcatggatgttggcggctccggccagccattgttcctccgccgtcaggcgcgtgcccgccacacccaggcccgtgacccgccgttccgttcttttgatgtggttggccgtcgtgtatttccaggtggtggatgtcagcgttttgacgtgtccttccagcggaagcaggtctaccgtttccgaggccggttcgtcgttgaagttgtccgcccccgaatgcgcatacgtgtagcgcgtgatgcgcctgccgctttccgcccacggttcgtcgcgggagagcaggcggccgtagaggtcataggcgtcatgagtctggctgccgtccggggccgtttccgtcctgagccgcccgcactggtcgtaggcgtattgcgtggtttgctcctccgggcttccgtagccttccgccagcgtgagcagcaggtcgcccacgtccgtggtctggtagatggcgcaggtgcgcgccgccacgattccgtttttggagatttccgtgaccagctgccagaccgagttttccggttccagctccgtgcgcgtgcggagggtcgtgagggcgtcttcccccgtgccctgccgcatgttccacgccaggccgtcgttccaccaggtgacggcatagggctgcctggcaggcgcctgttccgtgatggtgaacttttcctcagcatccagggaaagaataaatgttttcaagggagcgcccgtaacggtataaaatccctgtccgtccgttccggtgatttgcccaggggtatagagcgcgatggtgtaacccgtggaggtgacgttttccacgttgagcaggccgtcccacaggttccagatttgcctcagcgagccgtctccggcatgcctgacgtccagataggatgacgcgttggagatgacctgcctgtccgtggtggtgtaggagaggagcgttcccgtttccgccgagaagaggtattggctgccgtcttccaccacccagcgcaggcaggattgtccttccaccgtggccagcgccgcacgccctccgcccgacgtgtccaccccgatgggcagcacggacccgtccgtgtagcagcgcatggcaattacccggtctccctgcaccagattaaaccgtgctccggggacaatgcccccttccggcacgtccagacggctgttcaggggatggttgtaggccagtgaggagggtctttccaggccggagacgttttcttcacccctcagttccacccttccggccggaaggcccccaagtccacggaacgctccgaagttgcaggaccagtacatcagcgtggccgtgctttccgccgtcacgctgcaccccgccgagctgtagtttcccagggcgccgctttccatgcccgcctcagggcccgaccgggccagcgacggggaaggcggcgttccgccgctgttgtcgcacgtgtctccctcgcagggacacggttcgggttctttcctgccccccggttccgtcggcaccacgtcgatgctgtagttgcagatggaggtgttgccgcttgccggattgtagtcgatgttggtctggctgacttcccagctgtaggtgccggaggggagctgcgccccgccggtccccgtgtggtatttgtgcccgccctgctcgcccgccgtctgcgggttttccttcagatccacctgcgccaccacgttgccgccggagtcctttacttccaggattccccagtcgtccaccccaaggaagagcgagcaggtgccgtagagttttttgccctccgctccttccgggatggtgaatgtcccgtgcgcactgtacccgtccgccgacgtgctcggcggtcccacagtgatttcagcgtgttcgtggatttcttcaaatggcagcgggtcgggctccggagctgcctccatgccccgcctgccggggctgccgccggctccaaagtaccatttccggtagccgggaacggcagaacgatggacggaggaggaacgatgaggcggattcatcaggtattcaagagtcgggggtaatgaaggaagcgaggggggccgccctttcctgatcgttttatcaatagtatgatctgaagtcggtgtcgatagaattttatttgtatgtttttgattttttataaaagatggtcattattttacacgaaaagataatattataattcttacgttcagtgcattcccttaatagacatcaatgttgtctgtttgttagaaaatgttttcctctcatgctgagcccttgacaggaggccatcccttccgggcatcagtctaattcctgtaatcaatgtttttctttctcgaagaaagatggggccgtcgctgtcggacggggcctgcttaggtttcgtccggcatttccaagtacggtttcctggattactgggtgccttccagtgtaacatttattttttacgctgcgcgacgatgaggaagcaactgtctgatattttattcctggttcaaggaaacctgataatgaaaaaaactcccgacagccgatgccgccgggagtttttacagagcgtcttaagaaggaatcttctttagaaacagaggccttccttggcgttggctcgcatgaagtcgcggttgaggcgggcgatgttgtccacgctgatgcctttcgggcaggcagcttcacattcatactggttcgtgcagttgccgaagccttccgcttccatctgcttcatcatggccaggacgcgcttggaacgttccggctggccctgcggcagcagattgagatgggcgatcttggcggaggtgaacagcatggcggaggcgtttttacaggaggccacgcaggcgccgcagccgatgcaggcggccgcgtcaaaggcggcgtccgccttcactttttccacggcgatgttgttggcgttcggcgcggaaccggtacgcacgtcaatatagcctccggcggcgatgatgcggtccagggcggagcggtccaccatcaggtcccgcaggattgggaaagccttcgcgcggaagggttcaatccagacggtatcgccgtccttgaacttgcgcatgtgaagctggcaagtggtcacctggcgttccggcccgtggggaatgccgttgatggtcagggagcacatgccgcagatgccttcccggcagtcgtggtcaaaatggatgggttccttgccttccttgaccaggccttcattgacgatgtccagcatttccaggaaggaggcgtccaccggaatgtccttggcggcataggtctcaatgcggcccttggcttcccggttttcctggcgccagaccttgagagtgagattgagtgttttagccatgttataatctttcttttgagtgttaatgtattggctatctttacttgtagctgcggatggcaaggtgcacgttctcgaaggtcagcggttccttgtggagaacaggcaggctgtccacgccagtgtattcccaggcggctacataggcgtattcatcgtcgttgcgcttggcttcgccgtccggcagctggtattccacgcggaagtgggcgccgcaggattcctggcggttcagggcgtcatagcagagcagctgggcgaattccaggaagtcggccacgcggcaggctttttccagttccgcgttgatgccgtccgccgtgccggttacgcgcacgttttcccagaattccttgcggagctggggaatgcgttcaatggcgtgggtcaggctttcttccgtgcgggccatgccgcagtcttcccacatgatgaggcccagttcccggtggaaggagtccaccgtcttggtgcccttcacattcaggagcttgttgatgcgttccttcacttcgtcttccgcagccttgaattccggggcggcggtggtgacggcaccgggcttggtggtcgtcaggtaagcgggcagcgtggcgggaatgacgaagtagccgtcagacaggccctgcatcagggcggaggctcccaggcggttggcgccgtggtcggagaagttggcttcaccgaggacgtgcagccccttcacgttggacatgaggttgtagtccacccacaggccgcccatggtgtagtgggaggcggggtagatcatcatgggcgtttcatgggggtcgtcgtccgtgatttcttcgtacatgtcaaacagattgccgtattggccgtcaatccattcgcggcccatgcgcttgatttcatccgcaaaatccaggaagacgcccttgccggtgacggccacgccgcggccgtcgtcgcaggcttccttggcggcgcgggaggaaatgtcgcgcggagccaggttgccgaaggagggatacttgcgttccaggtagtagtcccgttcttcttcgggaacatcggaaggcttgatttccttcttacggattttttctgcggtttcacgggacttgggcacccagatgcggccgctgttgcggagggattccgacatcagcgtcagtttggactggtagtcgcctttgaccggaatgcaagtggggtggatttgcgtgaagcaggggttggcgaagaaggcaccacgcttgtaggctttgtaggcggcagtgacgttgcaacccatcgcgttggtggacaggaagaacacgttgccgtagccgcccgtgcagagcaggacggtatcccctgcgtaggatttgatttcgccggtaaccagattgcgggtgacgatgcccttggcttcgccgtccaccagcaccagatccatcatttcatggcgcgagaacatttcaatgtgtcccttggccacttccttttccagggcctggtaggcacccagcaggagctgctggcccgtctgtccgcgtgcgtagaaggttcgcttgagctgggcgccgccgaaggagcggttgtccagcaggccgccgtattcacggccgaagggaacgccctgggccacacactggtcaatgatgttggaggagacttccgccagacggtagacattggcttcacgggcgcggaagtcgccgcctttaacggtgtcgtaaaacaggcggtaaacggagtcgccgtcgttctggtagttcttggctgcgttaatgccgccctgggccgcaatggagtgggcgcggcggggactgtcctggtagcagaagcatttgacgttgtagccaagttcggcaagcgtggcggcagcggaggcgccagccaggccggaacctaccacaagcaccgtgtacttgcgcttgttgttcggattgatcagtttggactcaagtttgtacttggaccatttgtcctgaatagggccggagggaattttggcatccggcatccagtcgcttacgggaaaattaatcatgactttgagaggagttgatggttatttgatgatacccagaagaaccgagaccggcacggagatgaagcccaggcagataatcgcgccgtaggcgatggcgataaagttgtagaagggccggattttgcgggaatcgacgcccacagtctggaagatggactgtaccccgtggcgcagatggctgaacagcatcagaacggccaggatgtagaaggcggagcaccatacgttggagaatccggtcacgatcatcttgtacacgtcaaaggtttccaccgtaccgtcggaaatgaaggtggtgaactgggcggggtcgtatcccacgcgcagggtgtactggtacaggtggtagatcaggaacaccaggacggtcaggccggtatagatcatgtagcgggaggagagcgtcgccttgatggtgttcttgaacacgtagggttcgcgggccgcatggttttccagcttcagctggatggtcagccagacgtggatgatgaagatcaccgcaagccccgcgcggattccccagagggctgcttccggcatggagtgcaggccgtgggcgtaggtgttgatccattcagggcctccgaagatgagaaggttgcctgccaggtgtcccgcaaggaacaagaccaaacataaccccgtcagagccacaatgattttgcggccgatggaggatgtcacgaatgtacatatggtttttactagtgcattcataggcgctctaatgaaataaatgcgtcttcacaggatgcccggttcaagcccggatggcaagcctcttcttgaatttccggcgcttttcggatttttgaaaagccggggaaagaggttgctgtttatcagtttggaatggttatcattttgttgcctgttccggcttgacgaggctttccgcataggcgtatcgtctgtgcatgaaaagaagtaaaaaggaagtgctggacgcggatttcgcagcggcgcgcgccggcgttctggatgtggccgcatttctggaccgggtggaccgcggggaaggggaggcggatttccgttaccatgccctgatggatgttcttcccctcttgtccgcatccggccccggacgtgtccgggccattctggaagccctttcctacagggatgacaccgtgccggaaaccgccgcagccaaagcggcctgcggagccccgaacctcagcaaataaaaatgatggctttcatagaacctcatatacatatggtgtgccgcaccacggacgaataccgggccatggcgcaggccggctgcctggcggtaggggaaccggcgttctgggccggttacgaccgttcgtccgcggacggtttccgggattatttcgtacagcttacggaatgcgaacccgccagggcggccaagttcggcatggaccattacacatggctgtgcatcaatcccaaggaggcgcaggacgtggctttcgcgcgggatgtgatgaaactgattccggagttcattgaccggcccaatgtcctcggcatcggggaaatagggctgaaccggaatacttcccatgaaatgactatttttgaagagcatctggatctggcggtgcgcctcaaccagcttgtgctgattcacactccccatctggaagacaagcttaaggggaccgtaatgattctttccgccctgaaaaaccgtccggatctggacccttgccgcgtgttggtggatcactgtgaggaacataccttcccgctggtgaaggaggccggttactgggccgggctgaccctttatcccaccagcaagctgaatcccaagcgggcggcggatattctggaattgtacggaatggaccgtgtctgggccaattccgcggcggactggggggattccgatcccctggcgctgacggccctggcctgcgagctgcgcaggcgcggtttttcccggcaggaaacggaacgtcttctcctggaaaatccggagacattcatgggacagtccccgaagttccggaaagtgtcgtcccgctaattccgcccgaggcgcggcggagggtacggccctctagtccccgtccgggaaaaagacggtgaggacggcgcccaggatgaccgccgcgtcatccagaaggcccagcctgccgattccgtcaaacaggaattcgtcgggagtcaggatgtaggcgccggcggcggccagaaggcatatattccgtttgttgaaaaaacgcggttctccttttctgcttttgaaataccggcacaggcgcagtagcagctgctgtttttgaagattcatggacgggaacgggggataaaggttcaagctcagccattttcccactccttttccctgtttcggggaaggagtctgttgccgacggacggaaaccgcagcgatccggaccgtgcggggaaatggattgctgaaaggatgggctgttccggatgctgagggaagccgggctttgcatgctccggttccggctgtcccggcatgggaaaaaggggcgtgtacggaagtggggcggggtcggaagctcttgaaatgaccctcccgggggagcctgaatgccatttccccgtcaagtgctggccgtgagggtaccgcagcaaatggaagcttcttcccccctgttttttccggcagatgtttgaacggataaggaaaaggccggctcacgattttgtgagccggcctttgaatatagggaggcggacggtacaggcttatgccctgcggcggcgcatcatcagcgcggccagtcccagcaggcccagggaagccgtggcgggttccgggatgctggcgatttcactcatcagttgaccaacttgttcctgggaaaggagggagtcgtggatgtagagctgttcgatggattcagccagtcctgcgtccatgagaatctgattaatttgctggttgccgaatttcaggccgctgttggaatagtacgtagcgctgtcgccaaaatagatgcgggtgccaagatctccggtgactacggaaatggtcagggaaccttccgtgcccagcggggtgtcaacgacgggcccgttgtatgaggtgttgttccataatccctggagtttccggtccgtgttcaggcccacgccccagcttacactgctgtttttggcgttaaacagagcggtataggcgtccggagtgttgattttggacaggtcaagaaccatcgtcacagacataacgtcgcggttgttggcaccgtatccgttgaaggttatcccggataacgtcagattgctgtcgtcagacgtgatggaaacggaatctttcagggtgccgaaatccgccgtttgggaggcaaagtccgaatatcccacgatggagctatccagcagagaggtagccgcggtagcgcttaggctcatgccggccgaaagaatcagggtggataataatttattcatggtcagtatcttaataaaatgatgcaagattcaatgtatgtacttgtgcttgaataacgaatttggaatccgcaagcaattaaaaatattaagagttagtatattgtgtttataattcattgaaaataatgattttttaatatctctggtccttttgtcaagatgacgggtcagtctttgttattcattggtttcatgattgatttggcctctttttcattacttgacggattccaaatccgattggggaattccaaattcgctacaagttgccatccaaaaggaataataaatatgaagaaaacactgacacttttaatcgcgatgggaagctttgctgtttcctcggaggcagcgaccggttttaattattacactcccggtacggataattacaatagtaccatccatgggttttatcttagcctggggtcttcttccctggctccttccgattcctcttctccctcctccctgtccggagagatcagactggacagttttacgctgcgcggagccgccaacaatttgggcgctaatgtcacttacggcttcctggtgctgaatggctccgacaattcggtcatcggctggagcaccaatacgggaactactgcagcagggattaatctgacgttcagtttttcttccctggatggttctcccctgcttcttgacgcggcattgacataccgcttcctggccgtgagccagtccgtgatgggcttgatgcaggatacgtctaaaacgtatttatatgctgcgggggggacagccgcccctactgctaacacggaaggagataccgtaacgatcagcggcggattgactgctcccggcatccgcggccattatgacgccgagggaacgcctggtgattctgttgttattacgggagccaacggaaccaatactttcagcttattatctccgattttcacggaaatccgaggggaaatggtgccggaaccagccacggtttccctgggcctgctgggactggccgcgctgatgatgcgccgccgcagggcttgagcttcctgatggcgaaaaatcggcggatgagagctgttcttgcggaacagctcttgttttttatatccagagaggaagaattactcatccgcatgcgggattcatgccctccggaaggtacgggatttccgggggcagggggccgtatccggttttctccgcatggcggcaatttgctggaaacgtttttgagacgcaataccggaaagctttttctttaccggaaaatgccggtcaaattcggcagcgcgcttttcgtccatatggtacacggcagcttccacatagcggcctttcaggccggatagggaacccctttgcagcgcacagacctggagggccgccgcatacctattatccgccgttctgatgcccagcgtttccgcgggaacgaatccacagtgtgaagagtagtccgggtcgccgtacaggaaaatggcacggaagcccatttcacgcgcccggttcctggtgtagccgatcatccgccgtcctattccccggcgctggtattccggaagaacggcaatgggccccatgcccagcacttcatattcttttccatcgtctgccctgatgacggacgttgcatcaacgatgtttcccgacgatgcggctgccgtggatggcgactgcatcctgctccgggatgaaggaaggactgacgcgcatgatatggagcaggtaatgttcattgcagccggggacgaaatagtttcagaacgcttctctcgtgacatgttccgtttcggcatggtctgaggattgttccgttcttaatgcaatggtcatgaaagattgttctttacggctcccccttggagaaattccagaggcggtgcatcgtcataatgtccggaatgttcatggggcgcaccacgcggaacccgatcatgcctccgtccgtcaggtaccagatgcttttagggttttgaggatcctgacggttccaggcgggggtgctggcgcggcgcgcagcgcttctcaggctgtccgggtcgtcttcccacgaaccgccgcgaacgatgtgaggggcgccggggatgatgaccagggggtctttcgtgggcaagccgctccgtttgccgtaggcatccggaacgtaagagtccaaaacccattccgccacatttccgtgcatgtcccggagtccccacttatttggttttttagagcctgttttctggtagcggtcattggaattgttccagtaccaggcgtactggtccagagaggcttccccgtttccgtaagaataggcgccggcggaaccggcccggcaggcgtattcccattccgcctccgtgggcaggcggtagtaatgcccggtctgggcgctcagccattcgcagaatttgctggcggcgtggtgggacatggagatggcgggcaggccgtgttcatagccgtggcccatgcccaggttcatggcggcgtagggggcggtaggctgcgtgacggagtcccacagttcgtcatccggctgttcctccagaagctggccgtccttggcgcgcggacgcccgttttccatgaaggccgtataaagttcccaggggatttccgtttccgagatccagaagggagagatgctcactttatgctgcggaccttcgtccggtttccggtgcggctcttccgcgggactccccatgaggaacgttcctcccggtatggcgaccatgcgcagggaagctcccgccgcgggaaccgtttccgtgtaggattcaaaacgtgccggatttccggaagcttcaatgagctgatggatttggcgcgtcgtgccgaccagctcccgggacggcaggtcatccggaatgggaagggcaggaccggcagcgcggtccagttcccgtttttgcagcgcggatcggctttctccccactggcgtgcgctggtaatgcgcgcggcatcttccgtggccgggcggggggaattattttcttcccggcacccggccagcagggcgcttcctcccagaaagcaggaaacaaggaaaatgccgcgcatggaatggtgaaaaccggaatgccctacatcgtcatgcctccgtcgcaggcaatgacctgcccggtgatgtaacgggcatcgtcagaggcaaggaaggccgtcagggcggcgatatcttccacggaaccttgttctttcaaaggtattttcttgacgatttcttccttgagattgtcgggaatggcattggacatttccgtggagatgaagccgggagcaatggcgttgcacgtgactttgcgcggagcgaattccagggccagtgatttggtgaagccgatgaggcccgccttggaagcggcgtaattggcctggccgatgttgccgacgagaccgatgacggagctcatgttgatgatgcgcccggccggggatttcatgagaacacgctggagggccttgaccgtattgaacgcgcttttcaggttggtgtccagaacggcatcccagtcttcctccttcatgcggagcatcagggagtcccgcgtgatgccggcgttgttcaccaggatgtcaatctgcaggaagtctttcaaaatggcggccatggtttcctgaacggccgcgtaatccgctacgtcgcaggggtaggccttgcaggaatccggaaattccttgttgatttcttctgcggctcccccgcagctggatggactgcggctgatcaggatgaccctggctccttccgaagcgaagcggcgcgcgacggcattgccgattccgcgacccgcgccggtaacgatggctgttttacctgctaacttttgcatgctgcccacagtaaacccgtttttcacggttccggcaagcttgaaatggacctggccgcgcaggaccccatatggggaaagggcgggccgggaatgaaaaaagggggagaaacggggtgagggggaggctactgtccggcctcttcattttcccggattgcattggggggcgccccgtcttcatccggttctaccaggccgctgaattcatccgaattttccaaaatgtcctttaaggcggcggaaccgtaataacgggcctcaaacgggcgtttgccttcctgcctgcagcggttgtccagcatttccattcgttttttcattttttctatcaaggcgtcttctttctccttttccgcatcgttcaatttatcctgaagctggaggaaatgccggatgtccttctgaatgtcctgcagcgttttgacggcgttgtccgcgctttccttgtcctgaacgcctgccaacgtctgctggatattgatggcaaaggaaaaggcctggttgatcagggattccgcggaaggaattttttccgccggagccgctgctgtggggaagccgttccggcggccgtttcaccaaatgcaagagaggctccggacagaagcgcagaatataagagaggaacaagaaaagccttcatcctgttcttttgaggcaggatgaaatccacggcaaggaaaaaggggaaactgaaaaaagagccttattccgccgtgatgccgcctttttcatcgtccagaatgcctgacttttccagatagtagtcatatccgcctgcgtaggcggtgatggtcccccggttcacatgcagggttttttgtgccagggaacggatgaagtgcacatcgtgggagatgaagaccagtgttccttcatagtgcttcagagcctgcaccagggcttctacggacaaaaggtccaggtgggtggtcggctcgtccatcagcaggaggttgggcggatccactaggaatttgaccaagctgagccgcgatttttccccgccggaaagaacgctgacgcgtttttccacatccagcctccggaacaggaaggaacccaggatggaacgcgcttcttcctcccggatttcagcgctgcatttcatgatttcctccagcacggtattttccggattcaggttttccgttcgcgcctgggagaagtagccgatgcgcgtcgtggtaccgggagtgcgttgtccggagtcaatggggatgatgcccgccaggattttgagaagagtggatttgcccgcgccgttcggacctacaagaacagtgcgctccccgcgttccaccagcaggtccaggttttcataaaccctgcggtcgccataggattggcagactttttccagctcaatgactttctgggtgctgcgcggaggctgggggaagttgaatttaaataccttcctgcgggctaccggtttttgaatgattttcatcttttccagctgcttgatgcggctctggacttgcccggctttggaattgatggagcggaaacggtcaataaattcctgaatgtgcgctatttccttctgctggttgcggtaggccgcctgaagctgctcgaagcgcacgtccttttgttggaggaagtccgagtaattgcctcggtattccaccagttcttcgttgtcgatgtcgtacacgctttccaccagctcatccatgaaatcccggtcgtgggaaatcatcaggatggctccggggtagtttttcaggtatcgctggagccacagcagggacaggaggtccaggtggttggtaggttcgtccagcatcaggaggtccggctccaggacaaggagcttggccaggtacgcgcgcatgatccagccgccggacatttcccgggcggggcggtggaagtcgctttcccgaaaggccagccctttgagaattttcttggctttgggctccagctggtaaccgttggcggcgttgaaggtgtcaatggcttccgcgtattccggcgtatccgttttgttggcgttttccgccgtccggatggtgtggatggcctgttccatttccggcgtgatgcccagggcgatttccaggacggtttcatccttcggttcgctggcttcctggggaagatagcccacgatggcgtattcatccatgctgatggagccttcgtccggcgtgtcttctcccagaatcatgcggaacagggtggatttgcctgctccgttggggccgaccagagccacccgttccccccagttaatggtcatttccgtttccctgaacaaggtccgtccggcgtgggattttgtgagatttttgatcgtcagcatggtgaagagaggatgtattctaccgggatggaaaggggaaggcaagagccgtcagggcggaggcaggcatttttgaaagctttactggatttttacgcgtagtctgctagccttggcgcgccatgccgaccacgcagacattcaggcttttgcttgctgccgcccttttgtgcggatggagttcctgctgtactcctccggcggaggattatatacaacaaccttacgtgcagcagcaaatgtccgggctggctaatgccttcctggcgctgctgccgccggatcaggcctctcttcccgctgccggagcggaggccaggtggctggcggacacggccgtggtccagtccgcagcgattgcccgggacaacaggactgtgctgtttggctggctgaacaatattctggtcaattccaacctgcgcgacagggggctgtgctggcaggtccagcaggatttgtaccgggacctgcgccgccgccccgtgaagtatttccgcatagggctgacgattcgagaccgtggaacgggcagggagcacagttgcgtgtatgtcaatgccgcggggaagggattgcagggctccattgttctggatgcctggaagaactgcgggcatctggtgacgctgacccagaaggaccgggaaggcggcaaatgggaggaggactggcgggaaccatttgtttccaaggcctttccggagggccattcctacggcatggaacatcacctggtctggcccgggtgggccaggaaacgccccatgctggttcagcggatatttcagtccgatcagcagaatgaggcgaaggcggccgctgaataaaggggaagcctgatccggcaagaaccggcacacggtgctgcgccgcggcggtttgcggtatccgccgtttttaaggaaaatcccggcgaatcggcaaatggcggagggaatccggactcagggcaaataaaaacgcactcagtgcgtacaccgagtgcggattaattggataatttgctagtgttgcagggcaaaaccccgctgcaaacttacttgcccttggcctgcacaaccggagcgggagcaggagcggtggtttgctgttgctgctgctgctgggagcaagaagcgaccaggcaagcggcgccggcgatggcgaggatagcgatgttcttcataattcgaattaaatacagtgtttgttaactactggaacctccgcatccacggaggtttgctggcaccaatgtaaatggtggcaagtagaaatcaagagattttcttgttccatgtcacggcattacagaaaagagcaggacccccggtttctgaagtcctgctctttttgatgcgttatggaaaacggattgtttcaaaaccgttttttgcgcttacaggctgctcccaagctcaatgatggagtagtccccgtccggcctccggtacacgatctggagcacgtctcgccgcgcattcctatagagtacgaatggcttatcggaaagttccagttccatgatggcttcttccttgtaaagctttttgagattgtagctttctctgtgaatgagcaggggttccgggtcttccggggaatctcctgggtaatccagcacggaatcgtcatataccgtttcatccagcttgcggatggtttcctggtgatggggacggaaattcttcatcaggcgcgttttgtgcttgcgcatgcggcgcatgattttggtgatcgtttcatcaatgcaggcgtacatgtccgtcccttccgtggacgcgtcaatggtgatatgatccgagcagaacaggattacctgagaaatcttgcggtcgcgttgcacatcaagcagtactttaacctccataatgcgcgggaaatccaggcggatcccctcaatttttttcgttacgaattcccgaatcgcgtctgtgacttccacgtggcgccccgtgatcgtaatgggtgtgtttacgtttaccttttgcattgtcgtacctctttctagttgatgttaatgcgcggaccccgtccgcacctttcaagatatacagatttgacaatgcttgtcgaggaatcctttctttttttcgcgtgcggggaaaggcgcttttccttttccgtttccatatgccggacctgggcggctctcctacctgttgtgagccaatcaatcggggagcggccgtttccgtttatcgctttccgtcgtcttcggaatacgtttgaacgtctttgtcatacaattgcgggtataaaaaaattatttgaaagtacttgacatgctgcggaaatgccttataacagttgcgcactcctctacagatgctctctaaatcgcgggatggagcagccaggtagctcgtcaggctcataacctgaaggtcgcaggttcaaatcctgctcccgtaaccatttgaaaaccctgcaagttcattgcttgcagggttttttcgttacggatggaaaagcatccggcgagtattgggagtctgttgtttctgggagtttttgtattcggggaactggtgcccaagagggttggaatgtgtgctccggaagtaatttccaaactggcggctgtgccgatgaaagccttttcttgtgccgcagctccctttgtatgggtgctttccaaaagcacagttttcgcatgcaatttgctgggagtcaggaatacgactgacagggtgacggaagaggaaatccgcctgatgattcaggaaaatgcccgggatggggatatacaggatgtggaatgtatatttaatctcggtgaccggaatttggagtccatcataacttcgcgggggggggggatattgcatggctggatgccaagatgacggaacagccgtgcggtcagggtcagaggtccgttatccgttttagaccttattataaacggataacatgagaaacgtcgccaccaatgtggctggtcgtttttttcatgttgttttgtgcttatgatctacggtgtttcccttttgatgctgcgttgatttcagtaagcttcattttgtgctttgcctgccgttttcgattgtctgagaggttttctcttttgaatcatgcggtttcaacggaccgtagaaataggaggcggtggctcccccgtcaatcaggaagtccgcgccggtgatgaaagcccccttgccgcccatcagtaattccgctacatgggctatttcatccgccgtaccgggtcttcttgcagggcacttcgcaaacatgtttctgtaaaaatcacctctgggaccgttgaattcatcgattgccagaggggtgactataatgcccggggaaatggagttgatgcgtgcgcctttggcaccccatttgacggcttccgccatgacacgcttgacgttgcagcgtttcgccatctggtaggcatgcagagtgtccttgatattcccgggttggaggagttcgaggttcagcaattcctctgttggagtcatggccagttgttcgtcctgttcggcagtcagagcgggcatgcggtgaccggattggctggagatagttactcccgagccgccggggcaaataactttccccacctcttccagcaatacggcggttccgtagagatccactttaagaatggtttcaacggatgcctggctgggggaaacccccgctgcattgacgagcatggaaatattgccgtacctctgtgcttctgcaatcaaatgcaggatggagtcccgggaagagagatccatctctaaggggatggtgtcaaatccggcctgattcatcgtccgggcaatggcatgcgcgttcccgatatttttgtcgccaatgacgattttcatgccgcttcctattctgcgggcaatggccatgccgatttgcccggctcccgtcaatatcatgacttttttggatagacgttgttccatgggctatgaaatcagttgaaatgaccggtttttattcctagccatatgttatgttcctctagccggacggtatggccctcccgcaaaaagggcaatgcaaaaacggccataggtgatggtattgcaaaatgggtcatatggattgaaaaactgagggggggatgaaagaacccaggcaaaagtcatggcagcatgccgattcttttcagccatgttttgacgcctgcggcattgcccggcatgtcaatcccctcatcatcggcacgtccgggagttgtaatatctcctgggtcaaggtcttctggaagagttgacggaatgtgccgggaatggggcgtaagcctgtaaatttgttgcatggattcgtttaaataagtagtcgcgtcataagtaaagaagggaatgagcgttttccctttcaggtcaaatgcctctaaaaaggtgcaaatcaccatggcaggctgatgccaccagattggagagccgacgaagatagtatcatatttccccatcagggaggcttcaggcaagttggcgacctttgggcgcaggttctcataagcttcttttttgacacggtcgctgtcgcggtaagggtcggcattgtaggcctcggcggcttcaatccggtagagatccgctccggtcagtttcgcaatttgttccgccaccgctttggtattgcccgttgcggagaaataaacaaccagcggttttcccgcatcttgtccggttctgcggacaacaggcagcccttttgcctgcaacagcgtgttcagctctttccggactgcgtctgcttccccggggccgatgttcctggacacgatatcaagcagctggtgcagctgtgcgggtgttatgcccagattcaggcagatgcccatgtgagagcgggccattggttccacaccgcctatggccgcgaggatggatacggtagccaattcgcgttcatcataggtcagaacgtcccgttcaaaaatatctgcaaaaaggtgttctttcaggaaacgtttcatgaccggggcaaattcggcataggcagctttcggtgcattgacgggaatgccggagatttccgcaagaatggcgcacccgcgatcgtagcggctgcgtttgtcctttgtggggcaggcatcttgtcccggggcatcggctatgcctcgggactttcttttatccagcacggagatgaatgtctgcaatcccctcaggcttcgtggaaacccgcaataggcgtaggaatgcactaaaacttcccggatttcatttatcgtcaatccactgtccaaggcggcattcagggccggctgcagctgatgcaaatcccctctgccggtataggcggcaatcgcgatgatgtgtttctgcctggaggtcaattcctggctggaaagggcggaatttgccgccagagccagcacgcacgacatcaggcagaacaggacagacgataaaagattcatgaacctgggagagcagttttacaggtttttcccgaagaattccgccagctttccgacagcctgatccacgtattccggcacgtagtaggtcttgatatgcgtggcgcccggaatgaggaacaattccttgttgagggttcccgtggcgcggctgtagcattgttccgtcatgtagaaggtgtcggctctgctgcccgccatcatcagcaggggctggttaatcaggtgcataccttcgctcgcgtcaaaggcaaagaggtccatcaggctgcttttggtatagcggaaggtggaattggggtgggcgtggctttgcagataatagtcgtagccgtcctggtagaggtcaaagggcagttgggccgcctgttccggcgttactcctttcatgtctcccacgtattccggctgaccgccttccgcttcgcgctggcgggcggcgcaggcgtcggcaaggcgttcctgcacgctgttgatctgcgagtcgagaaacccgttgcgccggaccaggccggtgttgaacatgctgagcgtggcgactgccttgaaacgcttgtccgtctgtgcggttttcagggtgtagcctcctccgccgcaaatgcccaggatgcccagacgggaggcgtccactccgggatattgcagcaggatgtctgcggcgcggcggatgtcttccatgcggttggcgggtttgtccgtattgcggggagtccctccgctggccccctggtaggccgcgtcaaatgccaggcagatgtagccctgttccgccatgcgctggctgtaaagtccggccacctgctccttcacgccgccgttgggatgcgccacgacaagggcggggtattttttcgaggcatcatatccggcgggcgtataaacatgggcggcaatttgcagtccgttcagcgtataggtgattggatggatgttgacgcggcctcccatgttttccgtgacggctccccggtaaaccagcccccagggattggcgttgtggcttttaatgctttttgcttccgtaaattgggtttggcgggctggggctgttgaaacggccggagaatcatttgtgttcatttgctgcgcatttaactggcggttgaaggaaatcagggaaagggctattgaaataatggcgtttgttttcatggcatgtactttgcttcctcaaacagttcccattctatcatgaaaggctctcttcccgtcgatagacggattacaggttttgctaccatgattacagatggcggacgcagaaagtaaatgtgcgggggagtgtgcctgtcacctgtcaagtttgttctgccggagccaggcggccatatggtcggcaatgatgttattgtttttatcggacatcagaaaatgcgtatttccccggatgccgattttgggcagttccaccagagcagcatggccgccatgcctgttgacggcctccacaaatttgcgtcccatttgcagacgtacgcgccagttttcctctccaagcttatcggtgacgttttcaggaatataatctccgaagtagaggatgatggggatttgggtgagcttgttgaattcctccggcggaacggcgattcccttcatcgtgccggtgaggctgggcatgtcttcgggaacctccccttccgggaagacgtaggtgcccggttccagggaaatgatgccgcgcacttccgggctgcggatggccgtcagccagccggggaatccccctgcggagtgagtaaccaggatgcccttgcccacgcgcttgaagagggcgctcagggcatcgagttcttttgtcatatcgtgcgtgccgatatcgggtgtcatttgtcggaaaaactggtccagggaatccttgtccgtagggaactgtactcccgggttgaatgcgggccattcgccgatccggaagatgtcgaaccagaactgctcgtcggcaagtggcctgatggcggtttccgccgtcgttctgcccgcccgtccccgtcctgggaggtcaaccaggtaggtggcgtatcttttgcgcaggaacatgtcattaaagccctcccgtccgtccggtgttgtctgccagcaccgggcggactgtccatagccatgaatgaagattagaggaagcatgcgggcatcggccggtatctggaagtccacggcggcgtggtcggcatggtaactctggccggcttcaactgcttgcccccagccgggaaaacggctgttgtcatatgttcccgggcgttgcagaatgttcccgcccacggcaaaactgccctgccttgcaataagcaggggggcttgttccgcagctggaacaggggggatgcctcccgcctgaatcatggccggaggcgtgaatatcgataagaaaaaggcagggaggattaaccgtttttttttcatcatttcatgaaggagactgagttgtcatgcttttgcaagggaggaaaagcgtgatttgttgattaatgggttgatgatttttctgtgatggggcttcctccaaacacgtcggacatgttcatgaaggagagagctgcgtcgatctgccggacttcatccgcggatagtattacatgggctgcctctgcgttttctttcagtctggagaactttcgtgtccccggaatgggaacgatccagggctttttgcagagcatccacgccagggaaatttgtgccggagtggcctgtttttcttccgccagattgcggagcaggaggaagagatccttgttggcgtcaaagctttccggtctgaactgaggcatggagctgcggtagtccgtccccggctcaaacgtggaatttaggttgtagcggccggagagcaggccgttggccaggggggagaacgctacaaagcctattcccagttcttccagtacgggaagaagggattcatgatagcgcgccatcatggaataacggttctggatggcggtgaccggacatgttacgtgtgcgcgccgtatggcttcctccgttgcttcggaaataccccaatgcgcgattttgccttcacggatcaactcctgcatgacgcccgccacttcctccggcggtacggaatcatccatgcggtgctggtaatacaggccgatgcgttctactcccagccttttaagggaactttccacggattggcggattgtgccggggcgggaatcggtgatcagcgggtatggtccggggcctgccgtgccgctgaaacggattccgaatttggtcgcaataacgatcctgtcccggtagggcgccagcgctttccccagcagttcttcgttgtcgtgggggtgtccgggcgttccgtacacttccgccgtatcaaagaatgtatatcccatatccacggcccgggaaaggagttccgccatttcctttttgtctgcgggcgctccgtaggcatggctcattcccatgcagcccaggcctatggctgaaaccttcaggccgcttttgcccagctccctgcatgtcatgttttgcccgttaattgttttcatgcctgcaaaactaccataggatttctattttttccgatagacggattacaggttttgctaccatgattacaggttcccggaatgagctggatagccggctcccttcctgctatgctccggtaaaaagcagagaaagggcatgggcattattctgaacatggattccgtaggggactacaactcctttttggggcaggaaacgctgcaccctctggtcagcgtcgttgatttttccagggtcccgccgctgcggcatgtccgcaaggcttacgggttctatgccgttttcctgaaggacctgaaatgcggagacctgcggtacggaaggcattattatgattaccaggagggaactcttgtcttcgtatctcccggccaggtgctgggcaatgatgacaacggggaatatttccgggtagagggctatgccctcctgttccatcccgatttgctccgcggcacctccctgggacgcaggatgaaggactatacctttttttcctatgacgcttccgagtccctccatatgtcgtagagggaaaggaatttattcctgaacggcctgacggagatccgggaggaactggaacggggcgttgaccggcataccaagtccatcgtgacggccaacatcgaagttctcctgaaccactgcatgcgtttttacgaccgccagttcattacccgcgagaatgtgaacagggatgtgctgacggagttcgaacgcctgctggattcctacttcgagggagacaagcctcaggaatggggtctgccctatgtgcagtatttcgcggatgaactgcatctctccgccaactatttcggtgatctcgtcaagaaagagacgggaaaaactccccaggagcatatccatatcaagctggtggacaaagccaaggagctcctttgcgccaccaataaatccgttagtgaaatcgcctatgaactggggttcaagtatccccatcacctgagccgcatgttcaagaagaatacgggatattccccgaacgagttcaggttgtcggcgtgacgcccgttccctgtcgccggacggcctgcggcattctgtccggagcggaacggttcgttccggattgattgccgggccgggaatacagaaaataatcttctgttccgaacggcaataaacaggaatgcatcttttttcagctgttctgttgtccgcggtattcctattggcgcatgcgggcagtttccggcgccgggggaatgtattgccggggggtacaataatggcttcagcctgccggattcatattacggttttctgccgtggagaagaaataacgtcatcctggaaaggcaaccttttatgaacaggtattttatgaacgtgtggagcgattgtgtgccattactgccgtctttggccttgttacggttgcggacaaagggtatggtgcggcaagataaccgcgatattggacggcatgatgaatgaaagcggtctgccgcccgccaggagacgaccgtttgcatccttcccgcaacgccgttccgctgaataatataaaacactacaataatgggaaactcaatagaccatggcatgttccggaagtccgtcctgctggctttcggattgtccatttccttctcgggcttcgcgcttgccgcatcggaagaaccggttccggagcaacaggcccaggccgttgaaggcgccagaaaaatcaatcctgccgccgtggaagtgttgcttgacaacaaccgccggatgacgctcgatttttacggagacaatgttttccggattttccgggatgacagaggcggtattatccgagatcccaaggcggaaccggaagcccgcattctggcggacagtccccggaggccggtttcccggctggatgtggaccagcagggcgatgcggttgtcatcactacggggaaggtcaggattgagataaataaaaagacctctcttttcaaggtgatcaatctgaaggatcattccgtggtggtggagcaggcgtcccccgtcctttttggaaagggcaaaaccagcttttccctgaaggcgaagccggacgaatatttttacggcggcggcgtacagaacggccgtttttcccacaagggaaaggtcatttccatagaaaaccagaacagctggacggatggcggagtggcttcccccactcccttttactggtccaccggcgggtacggcgtcatgtggcataccttcaagaaagggcagtatgatttcggctccagggaagagaatctggtgaacctctcgcatgatgaaaattatctggatgtctttttcatggtcagcgacgggccggtcagccttttgagggatttctaccagcttactggcgctcccgttctgctgcccaagttcgccttttaccagggccatctgaacgcctataaccgggattactggaaggaagatgaaaaaggcatcctgtttgaggacgggaaacggtacaaggaaagccagaaggataacggaggcattaaggaatccctgaacggggaattgaataattaccagttttccggccgcgccgtcgtggaccgttacaaggcccatgacatgccgctgggatggcttctgccgaacgacggctacggagccgggtacggccagacggataccctggacggcaatattgcgaatttgaagagcctggcggactacgccaggaaaaacggcgtggaaatcggtttgtggacccagtccgacctgcatcccaagccggaaatcagcgctttgctccagcgcgatatcgtgaaggaagtgcgggacgccggagtgcgcgtgctgaagacggacgtcgcctgggtaggctcgggctattccttcggtctgaacggtattacggacgtagcccagatcatgacttactacgggaataacagccgcccgttcattatttccctggacggctgggccggaacccagcggtatgccggcatttggtcgggcgaccagacgggcggcgtctgggagtatatccgtttccatattcccacctacatcggctccggcctttccgggcagcccaatatctgttcggacatggacggcattttcggcggaaagaacccgttggtgaacgtccgcgatttccagtggaaaacgttcacccccatggaactgaacatggacggctggggagccaatgagaagtatccccatgccttcggggaaccttacacctccatcaaccgatggtacctcaagctcaagtcggaactgcttccgtacgcttacagcattgcggaggaatcagtttccggcctgcccatgatccgggccatgttcctggaatatcccaatccctacacgctggggaaagcgacgcagtaccagttcctctacggcccttacttcctggtggcgcccgtttaccaggaaaccagggcggataaggaggggaatgacgtccgccatggcatttacctgccggaagggcagtggattgattatttcaccggggatttgtatgagggcggcaagatttacaatgatgttgacgctcctttgtggaagctgcccgtgttcgttaaaaacggcgcgatcatccctatggcgaacccgagcaacaatgtctcggaaatcaatcccaatctgcgcatttacgaactttatccgcacggcagcacctcctttgccacgtatgacgacgatggcgtgacggaggaatacagaaccggcaggggcgtccgcactctggtggagtccagggtggacggcaaaaacaacgtgaccgtcactattcatccggcggtgggggatttcgacggtttccagaaaaagaaggccacggaattccgcatcaatgtgacgcagaagccgtccggggtttccgccaaaatcggggaaaacagcatcaacctggcggaagcgaattccctggaggatttcaaatccagggagaatgtttatttttatgaccgggctcccaacctgaacaggttcgcaacgaaaggcagcgattttgaaaaaaaggtgatcgccgggaatccgcaattgctggtgaagctggccgcagcagatatcacggcggcccctacggtgctttccgtggaagggttccggtttgaaccggctgaaaagtaccgcctttcttccggagccctgaccgctcccgccaatgctgcggtgacggaggaaaatgcggcggcctataccctgaagcccacgtgggacgccgtcccgaacgccgatttttatgaaatcgagtttggaggaatgctgtacaccaccatcaagggaacggaattcctgtttgaggatttggaggccgagactccttattccttcaaggtgcgggccgccaaccgggacggccattccgcgtggacggccgtcagcgcgaagacgaaagccaatccgcttgagttcgccattccgggaatcgaaggtgaaacgagcgtggaaaaccagggcagctccctggcgaagctgtttgatttcaaggaaaaggatgtgtggcacacgaagcatgatgcgaaggctgttccgtttgacctggtcatggacctgaaaacgattaacaggcttgagaagtttcattacgttccccgcgaggacggcggcaacggaacgctgctgaaaggcgctgtttattacggcatggaccgggagaactggacgaaggcaggaacgttccagtgggataaaaatggagacgtgaagatattcggcttcaaggatgctcccacggcgcgctatatcaagcttcatgtcacggaaagcgcgggtgattacggctccggcagggaaatctacgttttcaaggttccgggtacggaaagctatttgccgggcgatatcaacaacgacggcaagattgaccggaatgacctgacttcctacatcaactatacgggcctgcggaaaggcgattccgactttgaaggctacatcagtaacggggacatcaacaagaatggccttattgacgcttacgatatttccgtggtagccacccagctggaagacgaagccgaccagccgcaggaagaagccgacaagaaagatgaggaagaggataaggcgggaggggacgacgagaagaaaaaatccgccgaggaggcaaagaagaaagtccgcgtggacggaacgcttttgcttagtgcggataagaaaaggtattccaggggagatgccgtcaaggtgtccgtgaagggccggaacctccggctggtgaatgccctgagcttcgctcttccgtatgaccccaaggatttggaattcgtgggcgtggaggtgaagaacatgaagaacatggagaacctgacgaacgacaggcttcatacgaacgggaccaaggccctgtaccccaccttcgtcaacatcggagacaaagagcctgtggaaggaacctccgaactgtttgtgctgaaattcaaggctcgtcgcgatatgaagttccagccgaagctcacggacggcatggtggtggataaaaagctgaacaccaaaaaattgtaatttaacatcctgatacggctccatgcccggccaaatggcggccgcgcatggagcctgccgttccggcggagtatttccgcagtattcatcgctgtggagcggtgttcttccgcgtgttttggagaatccggacggagcggcgacgcggaaatattttcctgcctcgcgtttccggcggagcgtgacgcaatggggctctcttaacaggcggatgaaccgtttttttctggcgcgaccggtcttttcccttatgttgggggcgccagacaggccccacgatgctatgaccggccccggactcatctccttgttctgctttttaatgacggccgcctattttttgcgcggcgggatgtgtgcgggcgccgttttgtgcatgggcctggcgtttttttcattttcccgtcgcggctggcttcgcaggagcgtcacgtttctgctgcaggcttccctgcttttctggggggcggaagcctggcgtctggccaggctgtggatgatggaaggggggcctttcctgctctggacttccattccggctgctgcgctgttgcttcatgcggcggccattctatggcggaggcgcggagaaaagaatttgcccgttccggagctggcccgcagccgcgtattttccgtttccgtattgcttctgtttttgctggatgcgctggttcctttccgtttgctgatgggggagcgcatcttgccgtggcagggggtcaatgggctggcgattcttctcctggcctggtggggcggctattgcgcggaaggtttgttgaatccgcagacgtctccacgcaggcggcaggtgatgtggaccgtgtttgcctccgctttttttctccagtttctgctgggagtgacggtggcttcctccctgctgatgacggggaagctccatattcccgtgccgtttatgatgatttccggcccggtttaccgggaagaagggtttttcatgctggcattgttcagcgtatccgtccttatggccgggagttcctggtgcagccatttgtgctacttcggggtgtgggactgcctggccgccgcttcttcccgcaggaaggggcatccggtgccgggtgggaaaaaagcctgtgactggaggtggttttcccttgccgcggcggtggggattcccctccttttgtccgtgtggggcgttccgctggggtatgccctggcggcggcgttcgccgtagctttcacggctccatttgcctggaagaaaagttccgaaaacggtgtgcgggaatattgcagcaagttctgccccatggggctgaccgccagtttgctgggcaggctgtccccgtggcgcatgcgcgtcagggagacatgcaccgggtgcatgcggtgcgcctccgcctgccgtgatctcgccatctcgcgcgggggcggggcctgccgcatttcccggcgctgcaccttgtgccgcgactgtatttcccggtgtccgcatggcgctttgagcctcggcatggccggccccttttcctctgtgccgtccgtgcgggcggatatgtattttgtaacgctggtttccgtcatgcatgtggtcttcctggccacggctcgaatctgattttatgttgccatgaaagatttctgctccctggagtatccgttttgcggaggatggatggcatctgtccattaggaggctttttcagggctgccgtcagagggattcaggcagcggtgcaggagggggacggccctgaattcatggaacggcatggttccctcttcccatccgaaagagtggattttggtttcagaaggtcatttttgttattcattgagagatttattgatgatttaaagtttttgttatgatttttgaatgaccgttcaatttattaaagtcactaaaaaagatagggtctgctatgctccggtgccggagccgttggaagagggggataagctggaaatcatggaaatgaaggatgaagcccttttcccgccggcagggaaaaacgcaaggatttccctatccaggaatcccatggtattcgtgaaaatgaatgacggattccagcgcatcctgatgaagaatatcctgtatgtggaggcgggcggaagttattgcacgctgcacgtgcacggcatgccggctatcctggtatccgctccgctggcgcgggtatccgagcatctggatggggaatattttatccgcgtgcaccgttcctacctggttaacaagctgcatatagaatccattgcgggcaacttcctccaggtgggcgtcgttgccattcccatcagcaaattcatgaagaaaaaagtgctgggcagtttgaacatgctgtcgttttccaaataagttccggcctgccgcacgggctcctgcggcgttccgggaaagcgaaatggaacggccggaaaggcgggatggaagcagaaacggaatggccgcatcattcacgacgtcgccggaaggcggcatatcaatgaatctaaaccagaaatagaaattaaatatatggcaattgacagatcagcagcagaagcggcgacttcctccctgcagtcgctgcctttcggcaacatcatcggcggtcccctggtcgcctgtgtggaagcacaggcccaggcggcccggacttcctgggaattcatccagaacgtgggcctgtacgcggatggggaagagaagaagacggtgaacgtttccttccagttcatcaaggacggccgcatggctcagattacggttccccttctgaccatcgtccccattccctatatcgccattaactccatcgacattaatttcaaggcgaatatcagcgcgtccgccgccagtacggagacggaaaattcctccagttccgtagataccagcgtttccgcctctgcaaggtgcttttgggcgcgcggcagcatgaatgccagctattccagcaaaaaggactcctctgcgaccagggattccaaatacagcgtggaatataccatggacgtagccgtccatgccggacaggacagtatgcctgccgggatggccaaggtgctggagatgctgaacaatagcatttccgtcgtttctccggaagggttcctggacgtgcagcatgccatccaggacgacggaaccgtgaaattgataacctcctacaaaaacagggagggtctgtttgacccggaagccatcaccctgcggataggtgaagcgacggaaatatttgaaaacggtgcggggaatgaagccaggattgtgaaaacggattccggcaaggaatacacactttccagggaagacgccagaaactgcacggtgagcgctggagaactcaagaggaaggtggctgtaggcgcctgataaccgaaccatagcgatttctcctccattccagagccatgtcccgtcttaatctcatcgtggaatccctgctgaaggacattattgaagcgcagcatgcggcaaactgccacgcggcatcactggcgcgccagtatgggaagagaggccgtgcgtgcggtttcccgctgcccagcgcccagataggctccctggaattcgatttgaaatatgcggtgacgggaacttccgggatggaggagaaacaggttgcggacacggagcagtggagcctgttccggcaggaactggaagagcgcgtaccagcgtttgccatccgttccattgtgatggccgtagtgcattccagccttccggatgacgaagcgagaagcgacttctcaagcctgctggccagggaggaacagtggaaaaagaatttctgctcctacctggggaagaaaatttccgcagccgtttccgctcatgagggtgcgctcctgaaggcggaacccgggctggacaggggattgctgctggagcttctggcaggcgtcgcggaaagggagttcatggataatccggagctggaggatctgttccagggaacccggggagaccccctcaggcaggaatgccgcgccaatctccgggaaggcctttcctctttcttggccgctctggcggaaaagtacgtcctcaccaggcaggaaagcagtgtggtggtggatgtggaagtagaggcggacaagctgaaaaagatgccggaggaagccgtgcagaccctgcgcctgaatatatcccctgcttccattccctccgttctggcgaagcagaatgatgtttccggtttgtccgcgcaatagtgatagatgatgagtgattctacaaataataacaaggtgagcgggcacattatgagcctgcagcagctgatttcggcgccgctggtcgcaacgattgacgcggatgcgatgtccgcggaacgctacatgaagcatttcatgtccctggcctttgagtcctacaatcccgtggacggttccaccggggcgttgaggttgatcagcttcaattttacggacagcgacgcttccggcggcgcggaaaagaaggtcagcgtgccgctcgtcagcctggtgacgctgccgctgctgcaaatcaagcaggcggattttgattttgacatcaatatcattgacgccgtagccgccgcgccgaatgaacatttttccctgaacaggggagaggtggagtccccccgcggaaaagagcgggatgaagggctgaattttcgggcttccctggctccgcagtccgggagaggggcttcttcctccctgcaggcgaacatgaaaatccatgtctccatgcagcaggcggacatgccttccggcctgtcccaatttctccagctggcctccaggccgcattatgaggatgtcccttcccgggaaaagaatgattaatagaaagaaataacatggaccagaaaacaacttattcctaccagcgcactccggggcttgactgccccaaatgcggagtatatttccctacgaccattccggacttgctgtccggttccatcaggtgcccttattgcggcctgacgctttccattgaccggaaagcatcatgccatgccatgctggccctggaaaagttccagaacgcattagacaagcagcttccctccgcctccctgtcatgaagaaactgttgattaccctgtccgccgtgctgtgcatggttctgccgtccttgtccccggcggagatgcggcagcgggaaccccgccagcttgccgccgcctggcaggaagtcaagaagcagatggcagacgacgggaaaaccatccgtgtgagggacggcattcaagcgcttgaactcctggcggaactggggatcttttccgttccggcggacggcgtcaggctgtcctgcggcagcctgaccattgtggtcacgccagggaagaaagaggacggggttttttacgtgctggctgttaaggaagaagggggcgtaagcctggaagtgaagatggttccttcttcctgatttgccggagggggcatttctgcagcggaggaaggtcattcattttcaaaatcccacacgcggcggcgggcgttttttttcgtccgcccgccgttggctttccggaaggggtcaaaaagagagtccagtccgttccctttcagcagcaggcactgttccatcagacggcccagttttcctttcgggaaccctttggcctggaaccaggccagatattcctgggggacgtccatcagcggacatcccttgggcgggtatttggcaggaccgtacatgccgaaagggatgtgggtctgcgcgatttcctccaccagttttctcaaatcttccgcatccggtatttcaggatcgttcataggttttgcagaataaatggttgcaggcattccgccagcctttccggcgtttccaggggaagccggtggccggcatgagggatgatgacagcttgttctcccgccatgcgccgcgccagggtgctgaatttggcatcgcgctgcccggcaatccacagctggggaacaggggattgcttcaaaagcggagccaggttttcctgtgcgcccacagaccagtcaataaaggcgcgggagatggatttgcgccacggtttcagggaagaacggtccggaggcggcggactgcctttaaatacgccctgggcatcccattccttcaaaaagctttcccaggaagcggaaaggcattggacggcccattccgcatccttcgcccgccgcgccgcccgttcctcttcatgttccaggccgggattggcgctgacgaatatggctcctttccagagaggggggtgggccaaaacggcctgcatggccaacctgcctcccagggaatagccgcagaggagggggtggcgatcctgggaggctatttcggaacacagcacgcgacccatatccttcaggctttttgggcagcattccagatacctccagaggttcagggcgcgagcctccactcctccggcacgaagaaattccatgacgggtttccaatccgccggagaacccagattgccgtgcagaagccaaagcatggtcggaaccgcctttctatttgacgccgtagccggcgaggccgttcataaacatctggacggaaatcatgatgagcaccatgcccatcatccgttccagggcgattgtccctttttctcccagcagacgcaggaacttctgggcgatgaaaagcaccattccggagaggaaccaggcggtcacaatggctccggcataagtcatctgggaaatgctgtccggagtctgggaggcgtgcagcataatgatggacagggaagaggggccggccatcaggggcatggcgatgggaacaatgaagggttcgtcttttccgttcgcccgtccggaggaagaaagcatatccttggcggggaagaccatgcccagcgctacgagaaacagcaggatgcctccggaaatgctcagggtggaaggttccagccccagcaggttcagcaggaattttccggaaaagaagaaaaggagcaacaggctcaacgcaaatacaagctcccgcgtcagaatagccttctgctgagcgggcgagtattttttcagcattccctgaatcatgggcgccagacccaccgggtcgatgacgatgaacagaagaataacagtggaaaggaagtcctgcatgggatatgccccgttgtaaacgatacgggcgtgtacgtcaaagggaaccgtcagcagcgtcaatttttcccgtccgtccgtttgtcccgccggctttggaataggatgaaaggtccggtcccaggtagaggggataacgggctatgatcggggaaagataggaaggcccccgatctgtctggagacgggagccgcgcctggcgtccggctggttccagcgtccccggttcctgattatagaagaagatcctgaatattatctgaggaaatgactcccgtttccgtggaagacagtacgcagagagcgtccaccaggttttcctgccccagagccagcccggcttcctccaccagcacatcgtcaatattcaaggtggcgatggaaaggggcgccgtttccggcgcagaaggttccatcagggctgcaatgccgatgacggcagccaccagggccgccgccgcagctccccaaatgcggaaggaatgccgcttgaagtgatgaatggattccaccggaacggcgggagcgcattcttccctttcaatacgcatcatgaccttgcgggcaaaatcgtcccccggcgcaggttgggaggcatggcccagaatctgccagagttttgtatcgtcctgttcgttcatggttgtggttccgctgagggttctatgaagaaaaacaccggaagatgggtccggtttcttgccggtgtcatttttcccgttctgccgcctgtctgatgacgggggccagtacggcggcgatgcgtgcgtaaccggccgcagaagggtgcagtccgtcgctggaaagctcttccgggacgtatccgtcgctattagccatgacgcgtcccggttccgtataaatgaaattttcttccgtggccaggcgattcaggaggagattgatgccggcaatgcgttccgccgtaccttcccgggcgctgttgcgcgggtaaaatccctggaggatgatgacggcttttgccagtttgccggtgatttcccggcagacggcacgaatgccttccaggatttccccgtccgtgttttccgcaaggttgttcgtgcctaggagcaccacgcaaacggcattgtctttcgcaccgtccagttcaccgtggcggagccgccacagggcgttttccacccggtcgtagccgaaccccagattgaccgcccgcattcccgccgtgcacaggttccatgtttccggggatttctgcaaaatgtcccggtgcggttcgtccacgggcgcacctccccagaaatgcgtgatggagtctccgatgaagaggaggttcgggtgtgtttcgcgcacgatgcggcacgcggcttcatgccgggacgcccagtcgtaaatcatgaagtcccggtcctgggtgcagggaatcagcgtggagggtacggcctgggcgggaggagttccgggcatgatgaaggtttccgggggcgtaatgccgcgctttccccggaacaggcggaagcggatgcgcgcgccgggcggggcctgcaccggagccagatagcggccttgcgtgcagagcatgcggggagagtccgcattcacgtccattcggatgacggcttccggaggagcgttcatcgcggtaagtaccagttctcccgcctcattcagagaggcgcggattccgggggatggggaggattctgtcatgagacgtcgcgcatgtgctggcgcatttgcctgcgtccgatggagttcggcccgcggctgtcctgcatgcagtagttcacggggcggctctgggacgctccgtggggggcgcccaggcgcttgtccggctctgacggcagcagatgcaccactctcttgtttttccagaccagccagagcaccactacggccgccagtacggagatgtgcaggatgatgccggctacattggccagggcgaaggtcatccaggctttcatcatggcatggagggaggattcctgcgcttcctccggttcctggatggtgatgttggcttccgggatgctggcagggttgtcaggctccagcgcgggaagggtgggcctgggggcggatgccatgtccgcctccgttcttctggccagggaaatcatggcctcaatgagttcgtcctgcggattggtgaatcgggaagcgtcctgcttcacctggtacaggagatccctccgtcccgcatccccaagctgggaactcagctccggatccagtgcgatctgggcgcttttaatatcccccatgtggaaatggagcagcaggttgcgctccttgttcctgaatatctggcgggcgatggtgggagcattgacggaaggggggactttctgcccggccgcgaagatgctgacgaacaggttgacgttgtagcgggatttgatgagcttgataagttcgatgacgtcattgctttccacttccgcgagaagcttctgggggtcaatcaggcctgtggaggtgcggatgtagtccggcaggaaatattcattgacgtccgtaaagtcctccggaatgggatccacggcgggggagtctgcattggcggcgggttccggcatgggggaggagggaacggctgccgcatccacagggggcagcaagggagggttggcattccaccacgcgcctctcatcagggattgctggtcgcggttggtccatttcagggcgggtaattcctgggcgggagccggaaagatggccgccgccagcaggcatgggaacaaaaggggtttcatgcgcctcctcctttccgatcctcgggggtgggaggcgttaatccgtagcgcatgggatgcctgactttggagcgcgctttcctggctacgagctggacggcgtttttcatgatggaccccgcggcctggagcagcatgctttcccgcaggggaatgcgggctttcatgatggatttgttgatcaggtccggctctacataagggtccagttcatagccccacatgaagcaggccgtgtccgtgcgcacgtccagcaccagaatcaggagccactggggatccagcggtccctggtggttggggaagccggcctcatccaccgtcaggtggttcatcgtccagaaactgtgcggaatgagggaaaagggctccaggatgttggggaaatagacggacaggagaacgggggggatgcggcgttccagtttctccagcagggcgttcagcttcatgcggtcctgctgccggagagcgccggcgttgtcgcatacgcggcggtagggtatggcgtctttgccgtattttttgtccaggttttccagggaaaaaccgcagtgagggcacaatgattccgccccgcggtggaaattatgtaaacacttcggacaagtcggcacaaggaaagtttaagcacgaagttcgttgccgaaaagactaattgtcagaaagaaatcatgtatgtctcaatcttccagattttctttcgtgacacggtaaatggcggcgcatctggggcacgtgacttccaactcctcttctccctggaacaggtcttccttgttgtcctgaagggtcttgagcgtgggcaggatgcggtccagcgtgcagccgcagtaaaagcggaaccggcgcgtttccagcactcgggtattttcatcttcttccagatgggccattttctcccgggtgagggaagcaagccattcttcatccgcgtcaggctgggccgtcaccatggtgtagcattcatccgggagctcaatgcagcgggcgtttctctgttcgctttgcctgtagaattcctccacccaccgggccggagacgttcccggaatgggtacgacggagtattgcggttcaaaccccttgcggagcagggtggaatacagcgtgttttcttcaggttccttaatgtcctgtgtgaagacgcgccccacgacggattccgtcagggaagaaccggtgacaaacagattggcgacggcaggcgtccggagattgactgtccaggcatgctgctccgcccagggccgtgcgaccatatagagggtgaaataggccatgagttctttcagcaggctgtcgcagagttcttcgttgcgcaggccgtactgcatgaggtgaaggtagtagtccgtaaacaggggagaaaattttgacctgagcgccaggcaattgcgtccgcggacaaagatggattcaaccgtaatgaattcttctaccagttcttcgctcatgtcattcaaattcggtcttcctttgtggaaaatcaaccgttcctcctgtcattaggaaccatcatgacaggcaggtgcggcagtattctttttcccggcagggaaaggtgcggcggagaaacgggcgggaaataacggaggggcccggagactgtacgcaataagcctttaccatgcctttttgcgcgtttaacatgcacccatggcaactgacaagaatatcaccatccatacttccaagggcgacatcaggctgacggtgtttgcttccaagacgcccgtgacggcggcttcctttctgaatctggcgtctagggggttttatgacgggctcaagtttcaccgcgtgattccggatttcatgattcagggcggcgaccccaccggtacaggcatggggggccctggctacaggtttgaggacgagtgccgcccggacctcaggcatgacggccccggcgttctttccatggcgaacgcgggccccggcaccaacggttcccaattcttcatcacccatgtgcccaccgactggctgaatggtaagcacaccgtcttcggcaaggtgacggaaggccagagcgtggtggattccattaagcagggagacaccatctccggcattacgattgaagataatgcggatgatctgtttgcggaacaggccgaccgcattgccgcgtggaacaaggcgcttggtaaataacctcattccggcattcattcagcggagcgcggcacggggctgttcgttccgctgttttcttctctctgctttttcagtacatggttctggctgttcaaaacctgcgcgtgcagtatggcgcacgcgtcctgttcaatgacctttcctttacagtggaggatggggaaaggattgccctggcgggccataacggcgcgggaaaatccacgctgatgaagtgcattgccggtttgaatgaaccggattccggctccattatcaaatccaggcattcccaggtgggttacctgccccaggaaggaattcatatccgcgggcgcagattgattgatgaagccatgtccgcctttgcggacctgatggatcttcaggagcgcattgatgccctgacgcgggaaatggcggggctggatccccgttccgccgcctactctgaagttctcaatgaaatcggggaattggaactggtgctgcatgcccataattccgcccggctgcgtccccggacggaatccatcctgcgcggcctgggattcaaagacagggattttgaccgggattgcggagaattttccggcggctggcaaatgcgcatcgcattagccaaactgctgctccgggagcctgaagtgctgcttctggacgaacctaccaaccatttggacatccagtcccaacggtggatggaacaatatctgcgttcctaccggggtgctatcatccttatttcccatgatgtggcgcttctggatgccctggtttcccgtacgattgctttttaccacggccgggcggaggagtacgcgggcaatttttcctatttcctgaaggaaagcgtgctgcggaaggaaattctgctgcgccagaaaaaggctcaggaacgggagattgccaaaacgaaggaatttatcgaccgtttccgttataaagccaccaaggcttccctggtgcagtcccgcatcaagcagctggaaaaagtggaactgattgaggtggaagaggatgacgccgtcatgaactttcactttcctgctcctcccgctggcgcccattctgtggtcaggctggaaaaggtttccaaacattatggttccgtttccgtttttgagaatgtggattttgaaattgtcaagggagaccgcattgccattgtaggagtaaacggggcggggaaatccacattttcccgccttatttccggcggagaggcccccagttccggcagcgtgaccatgggacgccatacgcaggtagcttttttctcccagacgcatgctgatgacctggatccggataaaacgattctggaatgcgtggaagctgccgccacgcgggaatctgcgcccatggtccggaatctgcttggctgtttcctgttccggggggatgacgtgcacaagcgcgttggcgtgctttccggaggcgagcgttcccgtgtggcgctggtgtgcatgctgttgcatccggccaatttcctgattctggatgaaccgaccaatcatctggatatccagtctcagcaggtgcttcaacaggctctgtccgaatatccgggttcctactgcatcgtttcccacaaccgcagtttcctggatcccatcgtgacgaaagtactggaattcgtcccgggagaaaaaccgcgcgtttacctgggcaatgtttctgattatttggaaaaggaggagaggaaccaggccctggctgccgcagccgccttacccccctccggagcggcggaaccgggcgccgggctggaccgcaaggcacgcaggcgcatggaggcggaaatccgccagaagaagacgcgcctgctgcgtccgcttcaggagaaactggagctgctggaagaagaaatagcacggctggaaacggaaaagacggaaattacttctcaattggaacgtccggacgtggcggctgatacggaagccgtcatggagcttacctcccgttttcagcagacggaccggcagctggaaacctgttttacacaatgggctgacctttcggaaaagattgaagagacggaagcccgaattcaagaagaggcggaaagaaacgtttccggaagctgagaggatttttttcaaaaaactttgttgttgccggatatctaatccagagacaggtttttccgcaacgtgataaatgaatgtctgtccgttgcgggaaatcatcggcctgacatgttctggaagcggtttctgtccatctccatgcaagggggaaaaatatagagaaccggagcgggagaaatcggatttttctcaggatggccttttctttccgcttttccgtgttttttttctatactctgaaatcgtgacgccgcacagggtgagcaggatccctgtcagggatatccaggtcaggcgttcccccagaatgatggctgacgccaccacggctacgaccggtaccatgtaaatataaatactggatttgacggctcccagaatttccaccacgcggttccaggtcaggaaacaaagtgcggaagcgaacaggcccagatacagcagattaaaggcattgacgggttttaccatcagatgccagtccatgtttgccggaaggagccacagggcgggaatcatcagcgcgatgccatagaaaaaaatgcggcgcgtacagatgatcatgttggacgtgttgactccgatttttttcatcagaatggaatacgcagcccagacaaaggccgcgcccagtgccaggatatcccccgccggattcagttccagaacgaaggctccgtttgccatgatgaggaagatacccgtaaaggcggcggcaaaacccaggaagaaacggcgggaaaagccttcccccttcagcaggaaatgagccagaagggctgtgaagaaaggaaccactgccacgataatccccacattggaggcaaaggtatgggtcagggcgatgttttccagcaggaagtacagggtaaccccggtcaatcccgctccggcgaacaggaattcctttttccaaccggagaatggaagaaaccgcggtttcaggcaccagagaaaagcatatcctattacaaagcgggtgaagagtaccgtgacgggtgtgaaatcccgcaaaagcaccttggtggagacgaaagtcgttccccagatgagaatggtcatgagggcggctgcatggcccagggtacgctggcgggaactcattgcatcatggtgcgggtgaagggggcgtttccagcgtcaggcccagaatttccgccggttcctgatttttgttccagacggcgtgcagaacgccgccgggaacgagctgggattcgtactcgtgaaccgttctttcttttccgtcaagcatgacagagaccgttccacgggtgacaatgaataaatgagcgtgggcatggcggtgcggggaaagggggccgccgccgccgggggctattttggcgaaagctccgcctttcaggatttgctgcccgtccgcaaacaggttcctggccttgaagcccgtatgatcgggaatgggagaaaaggcgtccattcgtttatttgcgtgccaggtcgtatccgtccttgcggtctttgataacccagcccagcgctgccacttccgccctcaggcggtcggcttccgtccagtcccggttctgcttggcctgccagcgctgatccgccagggtgcggacttcttccggggcttcctcctgtccctcctccggcagaataatgccgaaggcggccagaataaagtggaaggcattccgcaggcgggtcgcctcctccggtgaaagggaggggatatccgccttcttgatggcgctgaaaacatggcccagggcttccggagtgttcaggtcatcgttcaggctgtcccatgccggctggaaaattcccaattccgggaatgccgcgcagaattcctcataggagggaacggaatccgttccggaggcgttcctgagctgtatatcaaatttggacaggcggttcagcgcggctttagcgtcttccagagaggaaagagtgaaattcaacggacggcggtaatagccccccgccagcacgtaccggaccgcagacggtttgtggcccagtttgtccaaatccgccagcgtgtacatgttgcccagggatttggacatcttgccgccgtccaccagcaggtgtgtgatgtggaaccacaggcgcgcgaagcctccgccgcaggcgcagcgggactgggccacttcgttttcatggtgggggaataccagatccacgcctccggagtggagatcaaagtcattgccgaagtatttatggatcatggcggagcattccaggtgccatccggggcggccttctccccagggagagggccagaagttgtcgccgtcttccggtctgcggctcttccacagcacgaagtctgccacggaatccttttcatattcgtccgcgttggaccgggtattggcggtttttcctaaatccagttcacgttcgtccaggtgggaaagctttccgtattccgggaaggaggaaattctgaaatacacggaaccgtcttccgagacataggcatggtctttttccaccaatgtttgaaccatccgtatctgttcgggaatatggcccacggcggagggttccgcatggggtggcaggcaattaagtgcggcgcagtcccggtggaacagagccgtccagcctgcggtgaattccgccagggaaacgccggccttttgagaatcccggatagttttgtcatccacatccgtcagattgcggatatgcgtggtgggaacccctcccagttccaggacgcggcggaagacgtcctgcatcacgaaagtgcggaaattgccgatgtgggcagggccgtacaccgtgggtccgcaacagtaaaagcgcagtgtttttccatccatgggagaaatggcctgggccgttctggtgcgggtatcgtaaaggtgtaacatggcggaacgattagaagggaagagggcttcccggtcaagcgggaaaagaaagccggggatccgcggttgcccgcgtccccggctttgaagaaatcagaggatggtaagaggaaaggaaacgctatttgtccgcgttttgctggccctttttataattttcgttaatacgttcgatttcctcctgggtgatgaatttttcccggtagggtttgttttccaccgtgcgttccagagtatagccgaaacgcttctggaaatgtttcttgtgagtttccatcttcttttcaaactcttccaggcttggacggttcttgtggctgccccacgcggtttcggaaacagccatggcgcgagggtaggtcatgtacatcagcaattcgccggagggaatccattccgcccacatgcagaggttgattcctttgatgtgcttgacgtcattcttgtcccgtccgttgcggggatcaaagttgtagcagtccttcagcaggatgggagctccgccgggccgggcgcgcacgtcgtccgccgggaatttcatctgggtacgcgccaggtagtacttgaactggggggtgacgatgaggtcgatgccctgttccttcgtcttatcaatgcaacgcgggaattctcccggcagccaggacatgacggtttcccccttgtggtaatagctcttgttgatgtcataccaaaggatgggctttttccggtgcttggagagcatggccgtcaggcttttcgtgaaatcgctcatctggacttccacattatccccctggccctttttggctcgggcggcctggcagtccgggcatttcttccagtctcccatggggcattcgtcaccgccgatgtggatgtacgggaaagggaatatctgctggacggtattgaaggtatccttaagaaactttttggtggccggtttctgcgggcaaatcagcttggaggaaacgccgccgtgcgtccatacctgggcccgtttggtgttgcagcagaattcgggataggacgcggccagggccatattgtggcccggcatttccacttccggcagcacctggataccgcgcgctttgcagtaggctaccaggtcctggagttcctttttggtatacatgccttcattggccagcagggaattgttctggttttccggagcggaagggcggacggcgccgatggtgcggagcttgtcgtagcccggcacggggagacgccagccctggtcttccgtcagatggagatgcaggacgttgtatttgtaataatgcatggcgtccacaaaattgtagatctccttcatgggatagtggtagcggcctacgtctaccatcatgccgcgccagccgaagtcgggggaatcctggatgctgccgcagggaaggccctcaggagtatccgaaagctggtcctggagctggaacagggtcgccatggccatggccttcccgttgggcgtggtataacggagttccacgccgccgggcgtcagtttcatggcatacccttcattgcccagtccggcgactttttgctcatggatgattttgaggtttttggtagttccggaagttgtcgtcacgttgacgggctccggaataatgttgtagggattggttccggcccagcagagggaacccaggaacgctgcggctagcaaaattgatttcatgcggcgccgtatagtaatggttgttgtttgtgtgaggatttaaaccctgtccctccgtcgtcaatggcgtgttccggacaaccgtgtttcgggaggaacggtgaatggcggcgtcaatctctggagggagcgcagtcccactgcggcttgacggccagtttgccggtggccccggggaagccttccggtacctggtagtctttgcggagcttgccgtacagggttttgagttctttcacggtttccgcatattccggtttgttgatgacgttgtgcatttgggccgggtccttctggttgtcaaagagcatccattcgtcgctggtccagatataggacagcgtgtagcggtccgtgcgcaggccgtcatggcgcggagcgttgtgttcacccggattttcgtaaaaagcgtagtaaagagaacggtttttgaaatcctgatgttctccggtcttgaacaggggagtgaggctgcggccctggaaggtattcatattttccttggtatttaccccggccacgtcgcagaaagtgggagcataatccagttcctgcaccatggcggaggagcgcacgcccggcctgatgtggccaggccatctcatgatgaggggcatgcggaaggattcttcaaaaatccagcgcttgtcgtacaggccgtgttcgcccatgtagaatccctggtctccgcagtagagcaccagcgtattcctgtccaggccgttctgtttcagatagtccatgatctggccgatgctttcgtccacggaaagaacggtgcccagatagtcttccatataatggcgccagcggcgcagcaaaatgtcgcgctgcgttttgattttcccgtttttaatatctttgacaagctgtacagtacgggccttgtggtagttgtaccaggcttccttctgctgcgggtccatgcgcacccattccggcatttcccagtcatactgagtatgcagggtcttggattccgggcaggaaagcattttctggatgtcttccgggaccacctccttgatcaggtgctcgtcagaccatacgttgaaatggttgagcagggtttgttccgtcattttcaggaattccgggcggtctgcaaaatcgtcttccagattggcgggcgggtcaatggcgtccgcatactgtttggcgcggcccagattctgaatggaggggcaccagcaacggtggggtgccttgtggcccacgacgagcatgaagggtttgtccttgtccctctggtccagccatttgaggcttttttgcgtgaccagttccgtggcatagccgggttccgttttcaccacgcgtttgccgtccttgccgggagtgatgaaatccggattgaaatagttgccctggccggggaaaatttcccagtaatcgaatccggtggggtcggattcatatttggacgtatctcccttggcgcccggcgggatggcttccaggtgccacttgccgacaatggccgtctggtaaccggccttttggagcattttcgggaaagtgggctgggaaccgtcaaagggagccgcatgttcgttgaagaggtacccgttcatatgggagtggcggccagtgtagatacaagcccgcgaaggtccgcacagggagttggcgcagtagctccggtcaaagaccatgccttcgtccgccagtttgcggaagtttggataaggcatgggagaatccttttcacaggtgcccagggtctggtaggaatggtcgtcggtgacaatgaccacgatgttggggcgctggtccggcgtctgcttttgaggctggtccgcggaagcggacaggggacaggccgcaagcatcagggcggtggcggcatgacggttcattgttaaaatcatgaattaaacaggcaatggttggagaggggggaagcggcggaatttgtccgcaagggcattcctgccggtacggaaaagaccacatccccgaaagaaaaaatgctggaagagagttttaggaaaaataaaacatcagtttcatatttcaatacaaaaatggggatggagcggaagcccatgaataaaccgttccgcagccggacggcaggggaaaagccgttcaggtgccacgtgggccggagcgcttgttccggccgttgttttcatgggattctttctgttccaggagccatgttctatcttcaaggctgagctttttcagggatgttctgctctggtgtccgtccagctcctgaagccagagggtctgggtcttttccgaataacgggaaagtttggcgaagacggtatttccgttgactcctgtccagacccggtagcctttgggaatcagcgtttttttaaactcttcatattgctgcttcgccagtttgacgctgttcttgatctggtcaaaataaagggcgttttgtccggtataataaccgcgcaacgtatccactttggagccgtccggagacatgaccagaagcacgggcgttcctctcacgccaaacagggagggagcctttttcacatactccagcatcttctggcgcttcctgtaaacaggttcgctttcaaatttttccgcctggtcgtaacagacgcggacgacattccttttcgcccagtcttcaaattccttcgtatggaggagttctgcccccagctttttgctgggagggctgcccacggaatggtggaaccagatgagaatgggttttccggtactctgggcttcccggagggcggtgggatagctttggatccagcgttcgttttccttacgctgggcgaaagcttcttccagcccggggatgggggcgtccgggtcatgagcgtccgtgtaatagacggccccgctgtctgccctggtcatttcctcctgtgtggtggcggtaagatgggtggcctgttgctgattcggggtagtgctcaacagccccgtcggcacattggcgatggaattggtcttgttatcctgcatgtattccgaaaggcttttttttaccttcggttcttcctgttccggagaggttcccacgcaggaacagagagccgcggacgcaaacaggaacatggacagccggggcagactcatgactgacctgatagcataacagggaaaaatacgcaaccgggaattgttcaacggtcgcagcggtttcagtatttcttggcttcctgttccttctgcttccggtcccgtatggcgatatccaggggggtgcatgtagcggtcgttgatgtggctcgccctgccggtgcgcagcttcttttcgtaccgtttgccccggtttctcctgaacaggaattcggactccggaacgcggcccacggtccggtagatcagctcgtcgatttcctccttttcccggtagccggcagcctgatgtagcattcctcctcccgggaatggttggggaagtagtgcaggaagtgtctcatggtccattttcatccattgaatcctgatggaaaggctgtttctggcgcttttgaacgaatgtttgctacggaagaaggaccacgtgaagtggctcatttagccggggcatgaatgctcaccaaaacgcaggccgcgagaacccgggaaaacagaaacagttccttgttatactctctatcatcagagtaatgggaaggaaatctgccgattaaaacgcgagtaataccctgttttccaaaatagccaatatattctccctgcaaataaactgttttcccatattcaaacggaaaaacgatataaagccgggaagaaaatgggttaatcccccgttttcagcaccttgatgaacgcttcctgcggaatgttgatttttccgatggccttcatgcgctttttgccttccttctgcttttccagaagtttgcgcttgcgggtgacgtccccgccgtagcatttggccgtcacgtccttgcgcatgggggagatgctttcccgggcaatgatttttccgccaatgcaggcctgaatggcgacggtgaagagctggcggggaatgacgtttttcaggcgttccgccagttccctgccgcgggaggctgccttgtcctggtgaacaatcatggagaaggcatccaccggttccccggcgatgagcatgtccattttaatgagcttggcggcctgatagccggcgtattcataatccatggagccgtagcctcgcgtcatggatttgagcttgtcgttgaaatccaccagaatttccgccagagggacggtgcaggtgagcattacgcgcatatcgtcaatggtctccgtattgtccacgctgccgcgtttttccaggacaagttgcatgatatccccgatgtattccccaggaagcataatgaacaccttgacgataggttcccggatttcctgaatttcctgcggttccgggagcaggctgggattgtccacattgatttcctctccattggtcttggtgacctcataaatcacggaggggtaggtggagatgatatccatgttgaattcccggcgcagacgctcctggatgatttccatatggagcaggccaaggaagccgcaacggaacccgaagcccagagctacggaagattccgcctggaaggagaaagcggcgtcattaatctgaagcttcgccatggccgctttcagggcttcaaaatcggaggaatccaccggataaatgccggaaaagaccatggggcggatttccttgaaaccgggcaggggggatgggcaggggcgcatgtaatccgtatacgtgtccccgattttgacatccgccgcggatttcatgttggcgatgatgtagcctacgtcgccggcttccagggaatccgttcgggtcattttgggggtgaagatacccacttccttcacttcatacacttcgtccgttgcgaaaagtttgactttcatgccgcggtgcacgctgccggaaatgacgcgcacataggagactacgccgcggtaggcgtcgtaaacggaatcgaacaccagggcgcgcagaaggccgtcctgctccgtttcaggcggagggatgcgctgaacaacggcttccagaatatcgtcaatgccgatgcccatcttggcggaggcatggatggcttcctcatgggggatgcagacgatgtcctccagctggcggtacactttgggcaggttggcgctgggaaggtcaatcttattgatgacggggataatggccaggttcagatccatggccaggtgcatgttggcaagtgtctgggcttccactccctgggctgcgtccacaataagaagggctccctcgcatgccgccagggaacgggacacttcataggagaaatccacatggcccggcgtatccagcagattgagcttgtaagtctttccgtccccggccttgtagaaaatggtaacggggtgggacttgatggtgatgcccttttcccgctccaggtccatggcatccagaagctgatcctgcttctcccgttcggaaatggtattcgtcttttccagcagccggtcggaaagggtggtctttccgtggtcgatgtgagcgataatggagaaattgcgagtcagttcaatggacatggtggtctctacccttctaacatgagtgccctgtgcgcggggagggtaacatagcccatgcggcggtcaagacttgaacatgactgcctcccgttccctgccgcgccggcttcattcgctccgggaaaaccgtcattcatgacaggggctgcgccgggagattgaacgtgagggaagaaggaaggctctcaaccggtacaggcacgtgaaccttttcccgtgcggtcatttcttacccagccagcatatgaaatcttttttagcagccattttaagcctatttattcccggtctcggccagttgtacaagggccactttgtccaggccatcatctggttcctggtggtgggtgcggcttacggcctcctgtattggttcatctttgcactcgttcctattgtcctgcatatcatttgtattttgcaggcctacttcatggacaatgaatgatgactgccgtttcggcttcacagccaggatggctgaaagggcagcgcatcctgcggattggcagcggcattcattcccagggttgcagaaggaatacgtcgttcatagcggcatcatttttcctcataccggtattttcaatgtttacggggttccatttgttgactgcggaaacgtaaacacaactttttgactttgaattaattaatattttcaggaagcgggccaggggaatcatcctccgataaacaaaaacccagagccgttccggagttgttccggagcggctctggagggtcaggaggaaggcttttcgggggtgggtggggtgccttctccttgg

SEQ ID NO: 18 - DNA, 52430 bp, Akkermansia muciniphila
  source 1..52430: mol_type = genomic DNA
ccgtgtaatatgccccgcactctttttactgtgcgtgcactcagagagcaaatccctttttttcaataatttatgttgaagggtacggtttgtttctcaacatcaaacggccatggatacttcttcccggaaaacgtctcttgttgtattgttcaaccatcagtatgaacgtaacattccggtaatcagagagctttattcaagacgcttttccgggttgcttcaattaatgccctactacaagggagatgcccctgacgtatgttccgtcttcgggaattctttccagttctataattatattttgcagtccagggaaagaatcaggcagttggagggcgattattttcttattatcggagacgatcttcttttaaatcccaggtttgacgaattttcaacgccgtccctgctgggaatccatggggaggatacgtgttaccttgacggttttgtggacgtttctctgccggtgtgttaccggggaacggcggaagcccaccatttttccataacccctcccggtattgatgcggaaagcgtcaacaggaacgttccgtcctatgaggaggccaggcggattttaaaatccaggaacctcatgcggcatgatgaattgtcgcgcgtacgcatgtttctgcccaaatggagccccggggggattcatgcgaattggaaagtgttgaagggcagggtatggcatctgctgaattactggaagcaccggattaaaaaataccagtattcctatcctgtcgttttcggatattcggacattgtctgcattccgaaagggaaattagacgatttctgtcgtatccttgaagtgttctccgcatggaacatgtttgtggagctggccattcccacggcgttgcagcttcttcccggaacaaagctgtctacgctggaggacacgcagtacaagtcgggaaacgtctggtttccccaggatccggaacactttgaagccatgaatgccgtcattgacgggctcgtgtcctcttccggaggagacctcagcgagctgcttgcctcctttccggaggaatacctgtatctccatcccgtgaaattgtcccgtttcgccagatagtggcgttcataaattgttttttatcccatgatgaaatatgctgtgatcggagccggggtttccggattgtccatggccggaatgttgctgaagaaagggcatgaggtagtcgtttatgagagggactcccggcccggcggcctgattaaatgcacggaagtacaggggaacctgtatcatcgtgtgggaggccatgtgttcaattcccggcggcaggaagtgctggactggttttggtcccggtttgacaaggagcgcgattttgtttccgcccggagacgggctgtcatttccctggagggcggggctgtggtggattatcccattgagaaccacctcgaccagtttcccgaggccgtccgttcctccatcgtccatgagctgctggaactttacaggaatcctcccgcggagccccgctccctgggtgagttttttctgaaccgtttcggaaaaaccctgaacagcctttattttacgccgtacaataacaaagtgtggaggcaggatatcagccaaattgccatggattggctggaagacaagcttcccatgccgagcgtggcggaaatcctgttgaacaatattgggcacatcaatgaaagcgccatggtgcacagttctttcttttatgcgaaaaacggcggttcccagtttctggcggatacgctggctcgcggcctcaaggtcaggtatcggcaggaagctgtaaatatcctcccgaaggacgggaaatggctcgtacagggagaattgtttgacagagttgtctttacggggaatgtcaggcagcttggggattgttttccctgcatggatgaattgcgcccgtttttcccccggatttcagaattgcgctttcacggaaccacttccgtgctttgccggatttcccccaatgattacagctggatttacatgccctctccatcccaccgttctcaccggatcatttgcacggggaatttttccagaaataataataacggggacatcaccaccgcgactattgaattttccgagcaaatgacggaaggggaaatcaggcgccagctggagcttattcccttttcccctgtgtatctggcccatcactgggaagaatatacctatcccgttcaggatgcttccagccgaaccctcatacgggaactaaaggagtgcctggaaccgaaaggcatttatttattaggccgttttgcggagtgggaatactacaatatggatgcggccatgagggcggcccttgatttggataaaaggctggctgcggagcagatgacacggggataagtcaaattctggacattgtggtgtatttgaacgggggattgtaaatccgcctgtttttaaaaaagtttggatatagttataaaaaaataactataaataacttatcgtgttgaatggttttttggtaattaaaaaaatcctgtttcaatccgtggttccatgcacggagatgattctccgttaaagttttccattgacagcggatttacaactcgttataggtacggacgcagaagatgtgttcccgtttttagggacatggtttccaccggaatctgggagtatggctatccgttattgttctttcgcgacccgcggctatcatttgcggcaatggatgcagatgatgagcctgaggctggcggattcctcagtggagttgtcctgttggaatcttaatcgcctggaaagggaaggaatcagggaggctattccatggtttgacccgaatttacagggtgccgggttttgggtatggaaacccttcatcattctcaaggagctggaacatttggaggaaggggattacctgctttatacggatgcggggcgcccgccggggaggcttttccatcattccttggagccgtttgtccaatggctccgggagaaggggcaggatatgatgccgggcgtgaatatttcctattatacgggaggccttacgcggtggtgcaagcagagcgtttttgatgaattgaagctggatagcgggtcttttgaacaggctcccctgattcagggctccttccttttcttgaaaaaatcggaacaaagcctccgaattctccgtgaatggatggatttgtgccgtcagttcaaattggtgtcttctgccactacggaagaagagagccgttgccgcgataattttgtagctcatacgcacgatcagacgctgctgtctctcgtggcggcgcaacatcatctggactgcctgtattccgggaagggcgtcattcatctggaaggccgccgggcgtttgagcggcatcccggttttgacgacaaagacccggaccggtttttggaagagcttggcgcaaagaaagcggagcatcccttaatgcccgtgctttgctgcatgcaacaggcgtttttcctgtatgaaaaagccatgaataaattgatgaagctggcgggcttgagacccctccgcgggttttacggttgatggacggttgtgtgcggaaggggagtttgcctgtttcggcctccgtgacggatctctccggcctgctatggacgaaaataaaaaagcgccggaaaaaccggcgcttggaaaggcagtttcccgtgtggcttttaccaggaagcgtcgaatttgggtataggcgttcctttgcctccggggctgttttccggaactttataggttttgcgcagttcgtggtaacgcttcttgagctgttccaccgtagtcttgtaggcaggatcgtcaatgacgtttttcatttgcatgggatcctttttcatgtcaaagagcatccattcgtcgctggtccagatgtaggaaagcgtgtagcggtccgtccggatgccgtcgtggcgcggggcgttgtgttcgccgggattttcgtaaaaacagtagtaaatggcatccctccagttgtcgggagttttgcccgtgaaagcggtgggaagcagggatacgccctggaaggtattcatgttttccggggtgtccgcccctgccgcagaaacgatggtgggagcgtagtcgatattctgcaccatggtgttgttgcggatgcccgcgggaattttgccgggccatctcatgatgaggggcatgcggagggattcttcaaaaatccagcgcttgtcgtacatgccgtgttctcccatgtagaacccctggtctccgcagtagatgaccagcgtgtctttcgcaatcccctctttgtccagatattccataaggcggccgatgctgtcgtccacggacagaaggcatcccagataatcctccatgtaggcatgccacttccattccgcaaacgctttcgggtccttcagttttccggatttcatgccgtccaccagggatttggtgcgcttggcgtaatagtccgtccaggttttcttttcttccggagtcatgcggttcaactcgcccaggtcccagccgtaaccgggggaaacgatgcttttgcgcatctcttccggaacctggtccttaagcactttgaggtcggaataaatcgccatgtgattggcgacggtctgctggtttttcttcaggaattccggacggttggcgtagtcgtcatggaagttggcgggcggcgtcatgccggaggtgtccaccttgcccaggtggcgcagagcagggcaccaggcgcggtggggagccttgtggcccacaacgagcaggaagggcttgttcttgtcccggttttccagccactggatggatttgtccgtgaccacgtccgtggcatagccgggaaaacgctttgtctggcgttttccgtccggcttgaggttgataaagtccggattgtagtagctgccctggccggggaagatttcccacgtgtcgaacccggtggggtccgattccaggtgccatttgccgaaaaggcccgtctggtatccggccttctgcagcattttcgggtaagtgggctgggagccgtccagcggtctttgtccgttgaagacaaagccgttcatgtgggaatgcctgccggtcaggatgcaggcgcgggaggggccgcacagggagttggcgcagtagctgcggtcaaaaaccatgccctggcgtcccagtttgttgaaattgggcagggccacgggggaatcattattgccggtgcccagcgtctggtaggcgtggtcgtccgtaatgataaagaggatattcggttttttattttcctcagccttggtttgagctgagaggggagctgccgccagcagggccagagttccggcgatgatggttttcaaaggtctcatattgcctggaggatataggatgacggcgccgtgtcaatgtcataggattccttttgccgggattctgcgttatggtattcttgccccatgctttcctctgctctggaagacacgctgcgtttgttcggcaaggagcggtttcgtcccatgcagagggagcttgtggagtgcgcgctggagggccgttcctgcatcggtattttgcctacgggttccggcaagagcctttgctatcagattccggcggttctgggaaatgggctgacggttgtggtttctccgttgattgccctgatgcgcgaccaggtggcggggctggaaaaactgggcgtggccgccgccaggtatgattcgaccctggcggaagaagataaagtcgccctgatggacagattgaagtccggaggcgtccgccttctgtttgccgctccggagtctctggaatccccgtggattcagcaggtcatggagtttgttccccccggcttgttcgtggtggatgaggctcattgcctttcggaatgggggcacagtttccgtccggattatctggggctgcccgtttttttcagaaagcacgggttccgcagcgtcatggcgttgacggccacggctacggagcaggtgtgccgcgatctggccggcctgtttggcgtgagcgatgaatgtattttccgggctgcgccgtaccgtgcgaatatcttccgccaggtggaaacgttgaaggatcaggataaaaccgcgcggctggttgaattgttgaaagagggaggccgccgtcctgccgtggtgtacacgcggacccgcaaagatgcggaaaacctttcctacgaattgggaaaagccggtttctccgtcaagtcctaccatgcgggcatgcccccggagacgagggggctggttcaggatgagtttctggcaggtacggcggacgtgctggtggcgacgattgccttcggcatggggattgacaagccggacgtgcgttccgtggtgcattaccatccccccgccagtctggaggcgtatgttcaggaatccggccgtgcgggacgcgacggccttccttccttcagcctggtgatgttgtccgcccgcgacagcgtggccgtagtcaaccggctgcatgcggcggagccggaccggcacggcatgaaagggctggtatccctgttgtcccgcaggggggagcacattgtttccctgtatgaggcttcctccgtttatgatttgccggatgtggcggtggaccggatgctgtttgacctgaaacgttccggttccgtacgggagaaggggacggggttcaagtattacagggtgcgccctctgttccggatggaggaaattctgtgcggccgcggcggggaggaatgcgcccggctgcaatggatggatatgcgccggcagggagaggtggaggatctggctgtggaatggggaatttcatgggaagaagccgccgcctggcttggtgacctggctctttccggggaatggaaagtggagctgcgccaggcagcccttcatctgtattcggaaggatttgacgcggaagaggctgcggaggaatttgagcagtatttttccagatcccggctgaacgggctggaacgctggaaaacctgcgtttctacgctgacgtcttccgcctgcctgaatagaagcctggatgcctatttcggtttccgggacctatccgggtcttgcgggcattgtcctgcgtgctgcgggatgttgcctgcggccatggaagaagaggaacttcccccgttaccggaagagctgcgctccgccgtcatggagctggcggggcagaggaagcccgcgctggcccgcccttcccagttggcgcgctttttgctgggactggcttctcccgcggccatgcgcgcccggttgtggagccatcctctctatggggcgctggcggacaggaaatgggaggatgtgtggattgaggcgcatgccctgtcgggtagttagaggccggtttttccgccttgggcggcttcataggcgtcaataatgcgtttgcaggaattttccgcatgtagcagggaacaccaatagcgggatatttcctccgggttgcgttttccggagtcccaggcgcggatttcttccaaaagtgccccggagaggctttccggagaatcgtttgggctgagtgtgcctgaatcatgggaaatgtaccattgcaggcagttcagctggggtgtgaggcgaggccctacgacagaggccccggcgcacagcgcttctgcggaggcaaggtgtgttccttcggacaaggaggtgcagagactgattctggcctgggattgtttcttttgcagttcaatattgggaatatagccagccagatgaatccgggtgcgaagaggctccggaagattgccgtgccattcccggagaaagtcaggaatattgccgtaaatttccgcttcccagtgcggggcgtgggcaagcgcctgttccagcgtggacatcagcaggcaggggcgtttatagagaagatcgtcccagcggcctacggccataatgatgttgcgcttctctcctgcaaagcggcaggtggaagaaatggggttgggaaccagagccagtttccggacgatggattttccgtagagccattccctatctgcaacggattggagggctgccggaatggggaaggcgaccatgtctcctgagtccaaatgttttctgcgccccctgctggcgaggttccatgtgtgctgtttcagaaggcgcagcaggaaaaaaacggaacctttgattttcccgtgaatgaaaacgtctttggtgtacatgtttttcgcgatgggaagccagtattgccacggaaaaaacagcccggatgagtccatgtacactaccagaaagattcccgcgtcatggatggctctggcgatgggaaggtatttgcccactccccaggcgtacaggatcactccgtcaatacccagggatttccaccaggctgcatctttcaggttggcgtattccgtgcggatgaggtcgggatcatctccttcctgggcaggtgtgggcatgatggccctgctttccacccccccgattctctgaaaggccttgcagaaagcgcctgaatcacgggaaaagaaagtatggtctcccttgaaggacaccggcgtgcatgtgtaccatttcatgatgttggtggggtggaagatgaatggaaaacgcggagctcgccaagaagggcttccatggaccgaagccatgcggcgggggagtatgtggaggacaaaagttgttgcccgtgcgcgcccatggccggccagcgttcttcttgcttcagggcggtgtgcagcgtctccgccagggattccgcggaaggttcctgtgcaatccagccattcctgccgtgggtgatgagctccggcaggccgccgttcggggtaacgatgacgggcgtgccgtggagccatgattccaggacaaccataccgaaggtttcctcccagagggagggcgctacggagaggccgcaggcggcgcggacggctccttgttcctcatggggaatgaacccggtcaggcggatggattcaagatggcgggaagagatataacgctccagttctccgcgcagggggccgtctcccatcaggtagagaatgcggccggggggggataggagttcccacgcctgaaccagttgcaggactcctttttcctgcgtcagacgtccggcgtaaaggacgtcccggcggggcgggccggcgaaaggggcggggttttgccggatgaaatgtggaataaccctgattttatcctccggtattccggtttggatgagaagttcccgctggcgccggctgatggcaatgtaggaggaaaagcggctccaggctcccatgcggcgcgtttgatgcaggacggcggcggccagggatgagtacgcggcgtttttcctccaacaggcgtgcatgatgccggggagatagttgccgccttggcaggaaaagcagggcgctccgtcccggtaaaatactccgttgaggcagccggagcggtaattgtgcatgtagtggatgacgggagcgggttgatgcagggccagttcatagacgcagggggacatggccgggaacgtattgtggatgatccatgcgtcatagcggttttcacgcaggcattcgcgcagtttttgctccacatccctgttgtggagcaaataacccattttcgtcagggcgccgtgggggctatggaacagctcctccgttgaatagacaaagggtgtgacatccgctatggcacccaaagcctccgtaatggcatggaagcagatttcttcccccccaacctcgccgtaacggctgaaaatatgtagaatgcgtgggcgttgcatggttgcggcggcacagggggttatccctggagttcccttctgagtttcgcgggatccttcaatagctcccgctgaatggcttcctgctgctggcgcagacggtcttcccgtaactgaagggattttttcccggctcccagcccggcattgacaaagggattgttgtccccgtatttggaccacgggccgcggggaatgcggtaaaattccacaaagcgccagtggacaatggctgttcctcccgtaatgcccagatagtcgcgtacggcaggggagatgtcaatgcccgcccctttgttctgggtattgacgggaggcttgtctccgaagacgtagggccagtcttccgtggtgaaggggccgcagtcttcccattgggcaaaacaggaacgcttgttgtagacgatttgcacccatctgcccttgcagacggattgcccctttcccgcatattcgcggcggaaccacgggatgacccgtgacgcctccgccttatgctcccctctggaaacgtcattataagggagcgccacgtaaaaggggttttgccgggggatgaatgttttcgggcggaagtccctcgtgcggcaaacgggatccgggttgtcgaagccgccgaagttttcccgccatgcggaatcccacgagcttttgtggttggctaccggattgcgttccgtgggttcttcccccacccagaagaccgtggcggtaatgttgagacgccagggataggtgccggggctttgcctggacgtcctgggaaggatgcggggagcgggccgctttcctccctctgtagcaacaggcgatttgacgatgacccggggcagggggtcccgttgcgttggggtgacgatgacggggcctttgggccgtccggaactgttcgccagggcgcgggtggcgctccggcctgtctggatgtccgccctggcggtttctgcggaaaccagaaccggcagcgtgagcaggcatgcggacaggagggggctcccgaagaaccccttccgtaatgcctgttgacgctgccggtagtttaccatcggtgcagttgggtgacgaagcggtggtccagcttgccgggataatccgtattgaaatgaaggccgcggctttcattgcggcgcatggcgcagtctacgatcagggaggccaccgccaccaggttgcgcaattccagaatgtccggcgtaatgcggtatccccagtagaagtcctttacctcccggtgcagcatccggagccgcgtggctgcgcggtccagccttttattggtccgcacaatggagacgtaatcccacatcaggcggcggatttcatcccagttatgatagatgacggaaagttcgtcaggcagggctgtatctccgtggtgccaggctgggatgtcgtaaggagtgggggaatcctttctcaggggatgcagggagagcatggagttcagcgccctcttggcgaccaccacgcattccagaagggagttggaagccagccggttggcgccgtgaagaccggtgcagccggtttcccctgcggcgtaaaggccgtccaggctggtctggccgttgacgtccgtcagcacgccgccgcactggaaatgcgctgcgggaacaacgggaataggttccctggcgggattgacgccgtagcggttgcatgtctcgtaaatcaggggaaaacgttcctggacgaacccttccggcttgtgggagatatccagataaacgcacatgctgcccgtcctcttcatttccgaatctacggcgcgggcggtgatgtcgcgcggggctagggatttgcgggggtcgtacttgtgcatgaattccttcccgtccgcgcctatcagcacgccgccttccccgcgcacggcttcggagatgaggaaggagcgcgcttccgcgccttccgcgcgggtgttgaagaaacaggtgggatggaactgcacgaattccatgttggcgatggtggcccccgcccgccaggccatggctacgccgtcccccgtggcggaatcattattggtagtgtacagatatacgcgcccgcagccgccggtggcgagcagcacgcggtctgaccggaagatttccacttccccggagacgcggtccagcacgtaggctcccagaacgcggtcttccgtgacgaggcccagcttggtggtcgtaatcaggtcaatggcgaaatggtcttccagcagttcaatgttggggtgaagcttggccgcctccagaagtttggaggtaatttccagtccggttgcgtctttggcgtggaggatacgccgtttggtgtggccgccctccctggccagttcataatcctctccctggttgccggggtcaaagttcactccccattccagcagttcccggatagcgtccgggccttcctccacgatagtgcgcacggcctgttcgttgcagaggcccgctccggcgtccagcgtatccgcaacatggtcttcaaaggaatcgttgcggtcccatacggcggcgatgccgccctgcgccttggcggaactgcaatccagaaatttgccttttgtaatgactgcaaccttgccgtgttccgccgctctcaaggcgaaactcaatccggcaacacctgccccaatgactaaaaagtcgctcgtcttcatcttgaatggtacggaattgtaccatgacgcgggctgccaagtcacgcccaatgatggggcggcagggcatatttgtctggaaaagaagtgtgaaacacgctaattcatgggcatgagaccccaagggaacgaacaggaagcgcgccggaacaagcatgtgcgcagcgcgccgtccaaaattgccgtgaaggcgctgggagaggaggtgctggacgggattctggacaaatcctccaaccctctgctgcttattctggactgcgtgcaggacccccacaacctgggagccatcctgcggacggcggacggcgcgggagtggatgccgtcatcgccccccgggacaaatccgtgggcattacggagacggtgctgcgcgtttccgtcggcgctgcggaaaaggtgccttttattcaggtgaccaatctggcgcgcaccatgaagcagctccagagccgcggcatctggatattcggcacgtcggacaaaggagaccgcggcctgtatgaaacggacttcacggggccggccgcactggtgatgggggcggaaggggaagggatgagaagattgacggaagagaactgcgatttcctgctgaggattcccatgaagggaagcattccgtgcctgaacgtatctgtggctacgggcgtatgcctgtatgaaatggtgcggcagcgttcctgattccatgactgtttttctccttccctcgtctttatgattcaggaacttgatcttgctccgggggaacgcgccaggtttatttcggacatccatttcggccatgccaaggcgctggcccgggagccggaagagctggggtttcttctggaggggtgctcccatctggtagtgtgcggggacctcagtgaaacccgtgaaagcccctgccgggaggaaggattggaaaaacgggcccgtttcctgcggatgtgccgggatgccggggtgcagcccgttctgctggccggcaaccatgatccggacgagaaagccggcctgctgaaattgcagggcggccgcatctgcgctttgcacggccatgcgctgttcagggaggtggctccgtggggatgggaatatttgaaaaacaagcaggtttcccgcgaactgatcgctgcgttcccggaggcggaggcagatttactgcggcggctggagctggcccgtaccatgagtgtgctggtgcctcctgtttatacgtgttccggaacacatcaaaataaactggtgcgttttttagctcattctgcctggccgccggaacggcccgtgcggattcttctggcatggctgacgatgatgcggcgcatggggaaatttgcagaccgtttttttccggaagcggaagtcgtcatttttggccatcttcaccgacgggcggtgagcgggaaaaaggggcggcggctgtacgtcaacctgggcgcctgtttccgccatgccagatgctgggcggcggacgtaacgccggaaagaggagtctccatccgcagttatacgcccggaggatatgatggcccggaggcaattctccgctgattgatgcccacggaaaaaaagtgaggggaacgcgtccgtgtttaggcgataatgtgttagagcaccggatgactagtccatacagtttgtggacgcgttccccatagaatttggccgcgcctgttttccctggtagccggcgggacagtttttcccggagcttttcaggacgcagccccggcagcagcaggggcgcgaggaggaaaaaaacctggaaaagaaggactccattctggcgggtgcgccgccggagcactttctttcaccgtttctttccgaattggggctgaccatgaagcaaagttagtgcaacctaactcatgttgcaagaaaaaagtttgtttcacctaatatttttcaagaagaggttgacttggtcagagccttggttattgttttttttgttagttaaacctaataagcatcaatcatgatacatgaaaaattttccactccggagttgagcaacagcctggaggattatattgaggccgtccgcaacattgagttggaaaagggatgcgccaccgtaggggaaattgcggaagccctgaacgtgaaaaaaccttccgcctcactggccatgaagcagttgaaggaacgcggcctggtggaatacacgcagtattctcccattgtcctgaccagggaaggccgttattacgcggaccgggtcatttcctgccataccatggtgaaggagttcctcattacggtgctgaagatggaggaaaaacgcgccgatgaagtggcctgttgcattgaacatatcatgactctggaggaaatctcccgtttccagcttctgacggatcgttgcagggagagaggagaataaaatactccctcatgattttccggggggacggttcatgagggaatggctcatccctctcttttttacttcggaacccgaaccgggggaaggcatcggcgtgtgctgcgcgcgctgacgtacactgtggaagcgttatggaggaacgcggaaaggtccggggtaatcagcccgaacatgcccagcaggatcagagaggagttgaacccgatgataaagcggtagttgcgttctattttttcaaggacggcacagctcaattcccttaaaacaaccagttcagccagagagctggacaacagggaaatatccgccacttcacgggcgatatcggaagaatccttcatggagacggaaacatctgcacaggaaagagcgggggaatcgttgatgccgtctcccaccatgcacactgttttgccggatttcttcaattgctggataaagcgggccttatcttcaggcagaacctgggaacggtattccgtgatgcccaactggcggctgatggcgcgggctgcggattcgctgtcccccgtgagcatgatgatggaggaaatgccctgccgtttcagccgggcgatcgtctctgcggcttccggcctgggcgggtcgctgacgccgatcatgccgattgctctgcggcctatggcgagaaagatgttggattttcctctggcgtgattgcgtatggtcagcctttgctcttccgtgagggggatgcgttcatcttcaaagagaaaatggtagctgcccacaagaaccttttttccatgaaggcgggaggaaatgccgtgggccacgatgtattccacctccgcgtgttcttcttcatggtgcaggccctcctccagcgctttgcgcacaacggcccgcgccacgctgtgggggaagtgttcttccaggcatgctgccgttttcaggatatattccctgctgcagtcgctcaaagggatgatctgcgttacctgagggcaggcggaggtcagcgtgcccgtcttgtcaaaaacgatggtgtccgttttggcgaacagctccatgaatttcccgcccttgatcatgatcttgcgcgctgcggcctctttcatggcggagatgacggagatgggggtggcgagcttgatggcgcaggaataatccaccatcagcacggagagagccttggagatattcctggtgaacagaaacagcgcccctgccgtgagcagggtatagggaacgatagaatccgccagcttttccgcccggctttggatgcgcgctttcagttcctccgaatggtcgatcagggcgatgatattgttaatgcgggactggtctcctgcggcgtccacccggatgacgagggaacccgtttccagcgtggttccggcaaagacgacggacccttcccgtttggaagccgcttccgattcccccgtcatggcggcctggttgacttccgcttctccggacagcacggtaccgtccacagggatgacgttccccgcgtccacgcggattttctcccccgggcggatttgctccatgggaacctggcacatgcctccttcttccacccgccagacgcggtctatatttatgctcaggctggccgcaagcgccgcccgggtctttttccgagtgtaattttccagcaggtctgaaatggaaagaaggaacatgatggaattggccgttccgtaagccttcgtgcctatggaaaccccgatggagacggcgtccagaacggctacgttgagccgtccgcttcccaggccggccattccgcgccgtaaataggaactgtaattccagaatactttggccattctgagcgggggcggcagaaacaccttgcaaaacaggaaagaggaagctttccccgctatgcggagaaaaaaggaccgggccagtttcctggcctccgcgcgctcttccggttcgtggctgcggagtgtttccggcctgagcctgtccagcgtgcggaaaatggcctgggggctggttccttcatacaggatgaacacacctccgttgcagggggtggccttgacggagtatacgcctttctgtttcaggagcctgcattcgatgccgtaagcctgatcatgattgaatgcgcagcggccgctgcgtacacggagcctgccgggcgtatgatggataacctggtaatgcatggataaggaaaaagaaaagggggaaacgcccttctccgtgcgtttcccccgttgggggcggtccattccgctggcggagaaggaaacgggcaccccgctgtttggtgatggacaatgagattgctactgttccggcctgctgtttttcgcggcggcctcatggcacaggtcttgggcttcttcccggatgtttgccagttgttccatggccttctgctggatgagcatggccttggaaaggccctggacggccaatttcctggcaacgggactttttactactttcgctccgatggcggcggcgatcattcctccgacgaagccccagaggcctttgttgttcatgtaactcatggtaatgttttgattgggttcatccggccttggcggcatgcagccgcttcttttccggaaggattggattatatccaatccagcctgcatttttttagcgtgcccccgtattctggtcaagatgaattagctgaaactaatttttagcagacatgaaaatatttttgcgatatttttaatacgttgaaaacaaataaaatataatgaaccaacataatgttgtactgagcagggcaagggcattgggaagaaaaagtgttgactgaatagttagtttaatctaactttgccgcgttgcatgaacttgacccatacaggacttcaccgtttcttccgccgggtctgtcggtacaggaaactggccgggctgctcatccggcgtcccagataccgtctgctctgcggagactgtgggttctgtatgggggcatgcggcagagctgtgaaagagcaagcccgggagaacggaagcggagctctttccctgtaaaaggaaagcgcccctctccacctctggatcaatcatataagtattataccacaaacatccaacgataagactaaccgttttctatgaagaagcataacataatagcaatggcgttgacgagcctcatggcgcttcctgtaatcgctcaagacagcacccctgctgttggtgatattttgcagggcatcaatatgttcactccggaagaaggcgatcctgcctacaaggtgaaggccaatgagaaatacggcacccaatggggtgtggatatggcctacggactttggaatacggaaaaggtttccgatgttaagcgccataacaacctggctcttcttcatgcccagcttaatcagcgccttattgaagacaaggccaacgggggaacctggttgcgtgtggaattttccggttcatgggggctggatcgtgaatccgctcagagcgatacgtttttcactgaagcctatgccacggcttccggcttgcatgctgacgcgatggggcctcatgaaggaatattccctgaagtggcgctgatgcaatactttgcagggaagcgcgcttgcctcatcgcaggtatggtgaatctcaccaactactttgatgctgtcagcattgccaatgactccttctcctctttcaccaatgacgggtttgtgaactccactatcctgcctttggtggacagcaatattggcggtattctgcaagttgaactcaaccgcaataattacatgatggttgccgtttcccgcacgggatgcgattccggatacaatccttttaattccgattattgcgatggttatgccgtggttggcgaatacggccatatctttgccgacggcgctgcgactctccgcatcaatccgttctataccagcacggatgtggacatggacgacgggaccggggaacgccgccgccaaaatgccgggcttgtcgcgagcatcgaatatactccctgcgatcctctgaccatttactctcgcgccggatttgccgccaaacaatacttgagcaactccgctgaattctccgtgggcgccaacattaagctcttcccttcccgtgaagatgacttcctgggcatttcctacggtgtgttcaaggggcagaccccctgtgacggagagcgcgctgagcataaccgcgaacaggtgctggaagtcatgtacagcttccaggtgaatgattatttcaaagttgttcctcacttccagtacatcgcgaatccggcttacagcacttccagcgaaaacattctctggggcgttcaggcagtcttttctttctgatcagctgatcctggacatggccgccttttctcttaaatcaggcatggccggagtttcatgaaagtataataacataaaatcttccttgtctgtctccatgcagtgagcggaatcctgcgtgagaaagatatagaaggggtctgcatgacctggcggcaacgccgcattctcgatcaggtagaggatgcggcgttgcttatttgattacggagccatttaccctcctttattgatgcctgctggcggagcttggaccggcaatgtatgccgggtcatggaatggccttcagcctttccttatctaccgtcaaatactgactgttgaaggtaggaggcttccccaaggctattccgtagaatttttatcccagggaaaaataaaagccgcctgaaaatgggctttcccacccctgtctccgttcccggaaaaaacggaaaagaaggctttttgccacgccggaagatggatgggagccgcaacgtttccgggggccgaagcgtttaaaaccatattgacttaaacgggaattatcttaaactgacagaatgagtaaggttcaatgggaaatttcaaatgatgaagtgaccgaccgtgatactgctctgcgccgcttgcaggaaggaacgaccggccacgtggtgtgcgcccgcgacggcgcgtgcctccagtcttataaggaagcggatggcgtgtaccattgcgaaattgtattcaagacggattcctgctgcccgccggtattcgccgccccggaaggggtgacgggaaaggagctggaaatgctttacgatcgttttgccaatggggacgatttttcctttgtggaaaaggaatgggaacctctgatggccgtggaataccgccatcgccacaatgtgatgtggttcatcttcctgttcattgcgctggtaattgcggccatggcggcatatcagcacggttggattgagtgacagggtagaggctggctgcggcaggcgccgtagcagaagaacctgcaaaccgcagaaaatggtttgcaggttctgaatgggataaccggggccgggatttaatcctgtttttcgtggtcgtgatggtggccgccgcagcaatttccgccgccaccgcaacagccgtcgctgtcgttgccgcaacatccgcagttgccgcagcacttgccgcgcttgctgaaaattttgtataatgcgtaggctagggccaggaaaagaagggtggcgatgatatatgttcccatattgttcagtagagttaaggggttggtttagaagttatttggaggctgtataaggtttctttgccaccaggtaaacgagccccagcaggagcaatagggcaatgccctgcccgatgccgaaggaagcttccgcataaagccatgctcccagctggtaaatcaggaaggccaggcagtacgccaaggcgcacatgtagccgatggcgaagaaggtccatttggcgctgttcatttcccttctgatagcgcccatggccgcgaagcagggggcgcagagaagattgaaaatcatgaaggagaaagcgctcaggaaggtgaaggctcccgcttggaccaggcggtccccggtttccctgatttcctcatcttcatcttcctcttcttccgcttcagcagcggattctccggaaccttcctccagggatgcctggagctcccggccggcgggggccatttcctgcgtttcgggggagtcctccgttttttccgcttcatcttccccggaactgccgtccgcatacaggacgccgaaggtgcctaccacgttttccttggcaatcaatccggtaatggtagccatggtgggtttccattcaccccagcccagaggctggaagacaggcgcggccacattgccgatggaggccagcatgctgtcattctgctctacggaatccaccttccagttgtagctggagaggaaccagatcagggcgctggacacaaagatgacggtcccggctttttgcacgaaagccttgcagcggtcccatgcatgaatgatgacgttcttccaggccgggatgtggtaaatgggaagttccatgacgaagggagtgggatccccggcgaacatggcagtctttttcagaataaggccggaaaggatgatggcgcccaccccgatgaaataggcccccggagccacccaggaattttccgggaagaaggctccggcaatcagggcaatgatgggagttttggccccgcaggggatgaacgtggtggtcatgatagtcatgcgcctgtccttttcgttctcaatggtgcgggtcgccatgactccaggaacgccgcaccccatggaaacgagcatgggaataaaggatttcccggaaaggccgaatttgcggaaaatgcggtccatgatgaacgctacgcgggccatgtagccgcaatcctccaatatgcccaggcacaggaacagaaccgccatttgcgggaggaatcccagaacggctcctacgccggcaatcacgccgtcctggatcaggctttccagccatggggcgcagccggcgttttccagcaggtttcctacccattccggaacccattccccgaagaaagtatcattggcccagtccgtgccccatgcgcctatcgtctgaatggagatgtaatatacagcccacatgacgacggcaaaaatggggaggcccagccagcggttggtgatgatgcgatcaatcctgtcgctgcccgtcaggctgccggggctggctttaacgacggcgtctttgatgatgcgggaaatggaattatagcgttcattggtgataatggattcactgtcgtcatccatttcccgttccatggtttcaataatcccgttgatgcgggattgttcctcgggattgagcgcgagctggtccgcgactttctggtctctttcgaaaactttaacggcaaaccattttttctgctgatccaggcattttccggtgatgatttccccaatttctccgatggctttttccagatggtccggaaagtggacggcctgcggggtccgggcgtcgtccgacgcagtcgtcgttactacggcgtctatcagttcacggatgccggtccccttgagagcgctgatttccagcacctggcaaccgaggttgcgtgaaagtttttccgtgtcgatcctgtcgccgcgcttccggacaatgtccatcatgttcagcgctataatgacgggaacgcccagttcgcaaagctgggtggtgaggtaaagattgcgttccaggttgctgccgtcaaccaggttcaggatgagggagggatggtccgtgaccaggtaattccggctgacgacttcctccagggtatagggggaaagggaataaatgcccggaaggtcttcaatgatgatatttttatggcctttcaggcggccttcctttttttccacggtgacgccgggccagttcccgacgtattggttggcgcctgtcagggcgttaaagagcgtggttttcccgcagttggggttgcccgccagggcgatggtaatgttgctcatgaatggtttccttgtcttgatatatgggtgcccgtcttgctgtaaaatcaggaaacgtgcggtaatagaggcggaatcaatggatatggatgttctccgcttccgatttgcgaatggagagttcgtacccgcggacagtaacttcaatgggatctcccagaggggcgactttgcggatgaatatctgcgttcccttggtaacccccatgtccatgatgcgtcttctgaccgggccttcccccgccagtttgccgacggtgacggtttccccgatgagggcatctctcaatgtacgatgtttggtcatagaataatggttggttgttggatggaataactcaggcaacgaatattttgctggcaagcgccttgctgagcgcaatcctggagcctttgacgttgataatgaaattaccgccgttttcggaaacgatggagaccgtgctcccggcaacgaagcccaggctttccagaaaacgccgggtttcatccttgccatggattttgttgacttggcgaatatcgccgatgttgagcatggagagtggcatggtgcgtgtatgaatcaaatccggaaagaagttagttttatcaaactgataagtcaatgatattattaggatatattttcaatcaatgtaaaattcgtttaatataaattgtttgcgtattagtttaatctaagtatggccagcggggaagaggcggggaatggaagtttcccggcagtgcctgccgtaggaactggaagggaaatgcaaaaaagccgcgccaatgaatgttcattggcgcggctggaaaaagagcttttcttcagattcaggaggcagggcaaacttcgccctggacgggtttgccgttgtattctccggtaagcgttttcaggaaagccaccagcagtctcacttccttcttgtccagtttatcgtaaccgagctggtaatggtacattttcgtaatggcttcctccagcgtctgtgcggaggcgtcatgcatatacggccaggtgagttccacgttgcggagggtcggaacgcggaagcggtgcctgtccgattcctttttggagaaattcatcaggccgttatcgtcattggtcttggcgcgtccggcaaagaaatcgcctttgaggtcggcgtattcaaaggactggcctcccatggcgggaccggtgtggcaggtctggcaaccaagcttcaggaaaagcttgtaaccttttttggcgttctcgctgatggcgttttcatcccctttcaggtagcggtcaaacgggctgttcggcgtgataagagttttttcatattccgcgatggcattcgtgatggtctctccggtgaatccctgggggtaaacctttttgaattctgcggcaaaagcggtgtcttggtccagtttggcagcgatcttcttccagtcatccggatgttcgtaccccatttccaccggattcaggggtggtccgccggcctgttcctggaggttggctgcgcgtccgtcccaaaattgcttggcatggaaagcggcattgaaaacggtgggggcattgatgccgcctttctggctgcggactccagtggaagtgggcaggttgtccgtcccggctttttccagggaatgacaggaagcgcaggagacggtattgtccgtggaaaggcgcacgtcatgaaaaagcttgtagcccagggcaactttggccggatccgtggggagggcgtccggaatgggggcaagaggggaaagggcgtattcctctcctaccatatcgccgaaaattttcaggcgctcatccttgatccactggagcatggcgtttttctcccggagagtgagcgtgctgccccagtgcaccatggtgtaggaagtggggggcatggaattgatttgaagcacatgttccagcttggaaagggtaacggcagtgggaggttcttccatattgtagctgcgctgcccgtccctgatatggcgcgccagcaggcctccggaaagagtattgaccagttcggaaatgtgagtgccgggcttgtggcagtccgcacatttggaattcatggtctgtgcggtaatttccgccgcctgggcggacgtcagtggcttgacattctggttcggcaggaacaggggggcgacagccgccgtcacgatgaccgtgccgcccagaatggctcctgccttgatgaaggaacatgttttgctcatgagattttcaatgacgtggaattgcccggatggtaaaaggggagggataaaaaatcaagatttattctaaagttcgccagcctttctcaggtcttcgttaatggcttccagaacatccgcttccggggtgaaattggcggcgtggtaggagctgcggaccaacggcccggatgccacgtgcctgaagcctttggagcgcgcaacttcctcataccgggcgaaatcatccggatggacgtatttgaccaccggaagatggttgcgggaggggcgcaggtattgccccaacgtcaggaccgtgacgccgtgctccagcaaatcgtccatggagcggaaaagctcttcttccgtttcccccaggcccagcatgatgccgctcttggtagacactttgccgtccacgcactccagagccatccggagaacgcgcagggaccgccggtactgggcgcggaagcggacaatgggcgtgaggcgttccaccgtctccagattgtgtccgaaaatatgcggacgggccgccatcagcgtctggatggaggagggcttctcattcaagtccgaggcaagcacttcaatgatcgtggaagggctggcttttctgacggccctaattacctgggcgaaatgcgcggcggcgccgtccggcaaatcatcccgggtgaccatggtaattacggcgtggcgcagcttcatgtgcacgacggcttccgccacgtgctgcgattcttcaggatccagcgggccgggcttggccgtgcgggtggcgcagaatccgcaggcgcgcgtgcaccgttctccggcaatcatgaacgtggccgtaccctggttccaacattcataacggttggggcagtgtgcttcttcacagacggtgaagaggtttttgccttccacaagctgcttgacgtcccagaattcccggccgttgggcagacgaaccttgatccacgacggtttgcgttccgttccttccgcagtctcattgtcgttccggcgttccatagtcccgctagcttgccgtgactctgctgctttggcaaatgcaaagtgttttattccggacttcattccccgttttcatccggaggggaagaaagacgcgcagacaattttttccgttcttttgccgccagacgcgccgcacggaaaaactcctggagatgaagcaggcactcgtctcccagtacgccgggacgcacctcgcacttatggttcaggggcggattggaatccagcagattgatccagccccccgcagccccggtttttgcatccgggcagccgaaaacgacgcggtccggacggcagtggacgatagctcctgcgcacatggggcacggctccttggtgacatacagggtgcagccttccagccgccagtcgcccaaagcctcctgggccgccgtcagggcaatcatctccgcatgggccgtagcatccttgagcgtctccacctggttccagccccggccgatcacgcagccatccttcaccacaatggctccaacaggcacttcccctttcacgagggcctttctggattctttcatggcttggcgcatgaaccattcgtccgaaccgggcatttccatcattacggaggttatcatggaccgggcggcgcggttctggcaagctctttctggaagattcttattgtgttttatacgataagtgcgccatgccgcggaaaggggtggggatgaatgcgtttttacgttgattccggagaatgggtggcataagtatggactatgagcttttcagaaccctgtgccttggccgttgatttcggcggcacgagcatcaaaatgggcgtaacggcgggggagcgtattctggcgacggccgaccgcatccctactgccatgttcgaaagcccgcaggcaatcattgatgccatgattgcgtccgcccgcaccctgcgcggacaattcccctccgcctgtgtgatgggcatgggaatgccgggatggtgtgattaccagcggggagtgctttaccagcttaccaatgtgagggtctgggatagggaaattccggtgaaagagatgatggagcaggccctgggcctccccgtcgtgctggataatgacgccaactgcatggcttatgcggaatggaagatgggcgccgggcgcggcatgtccagcctggtgtgcctgacgatgggaacggggataggcgggggaatcgtggtgcatgaccgcatgctgcggggaaggcggctttccgctgcggaactgggccagaccagcattcattaccaggggaaaacgggaccgttcggcagccggggagccattgaggaatacatcggcaacaacgaactggcggcggaggcggttaaacggtatgccggggcgggaatcatcaagacggtggatgaatgcacgcccaggcatctggacgaggctgcccggtccggatgtcctatagcccttcaattatgggaagatacggcggaaatgctgggctgcctgatcatgaacctgatgtatacgctggtgccggacgccttcatcatcgggggcggtgtggccaaggcaggggatttgttgatgaagccactgctggagaacctcaggaaacagttgtttcctctcctgatggaggatttgaaaattctgcctgccagatttggagcggaggcggggttgctgggagcgggagccatggcgatggatgaattcatggggatggggattttggaacggtttaagaatcagaaatcaacgcagactttttgttagtttgggctaatatagggcttgccatgccggagaggcaggcgtacaagaggaacaggtcatgagcacggaacattcccacgaacattttccggaaggtgcttcctgttgttccggaagctgcggttctggaagctgttgctgctccggagacgccatcgggcctgttcccgccgtgctgggcattgccctgttcatcagtgcgctggcggcgggcggcgattccctggccggtatggccgcctacgtgggctcctacctgctgataggctgggatgtactgaaggccgcctttctggggatgatgcgcggccgcgccatcaatgaaaattttctgatgagtattgcttccctgggggcgatgttcctgggggattattccgaggcggtgggggtgatgctgttctaccgcgtgggagagtaccttcaggaacgtgcggtgggcagctcccgtcggtccgtaagcgaactgatgagtctgaggcctgaggccgtccatgtgaaaaaagccggagccgtagatgacgttcctccttccgaggttctgcccggctccctgattgaagtgcgccccggcgaacgcgttccgttggacggtgtggtaacgggaggtttctccgtgctggatacctccgccatgaccggggaatccctgccggtggaagccggatccggaagccccgtgctggcggggtacatcaacgggcagggtgtgctggaagtgcgtacggagcgggactggcggcattccgccctggcgcgggtccaggaactggtggaagccgcatcaggccgcaaatcccctctggaggggaggctgtcctcattttcccgcatttatacgccgctggtgatttccatagccgctctggtatttttgctttatccccttgtgacgggcggaagctgggcggacggtctgttccgcgccctggtcctgctggtgatttcctgcccctgcgcgctggtactgtccatcccgctgggcttttttgccggaatagggagagcggcgcggcaggggattttgctgaaagggagcaactatctggatgccctgcggaaggtgaagacggtggtgtttgacaaaaccggaaccttgacggaaggcgttttttccgtggatgaagtgcttccccgtgacggcgtttccccggaggaactgctgtactgggcggcccatgcggaactctctgcctcccatccgctggggcgttccattgtgaaggcatatgaagggactctgtttccggaccgcgtggcggaactggtagaggtgacgggcggcggcgtttcagcccgcgtggaagggagaccggttctggtggggaaaaagtcttttcttcaagaggccggcgtaaggacggaggagggagaagaccatggcgtgaccgtttatgcggcgttggacggcatacttctgggatgcctccgcctgtctgaccgcgtcaagccgggagcggagcgtgcggtgcggaaattgagggaactgggcgtttccaacctggtcatgctgacgggggattcttcttccgccggaacggaagtggggcttaagctggggatggacggggtattctgcgggctgatgcctgccggcaagctggagcatgtgcgccggctgaaacctgaaacggggctgcttgcctttgtgggggacggtatgaatgacgccccttccctcgctgctgccgacatcggcattgccatgggcggtgtagggtccgatacggctcttcaggcggctgatgtagtggtgatgaagggagatcctttggccgttccgctggggatgatgctttcccaagccacagagcgcatcattgtgcagaacatcgttcttattttgggcgtcaaaattctggtcatggtgctgggtattctggggctggcggggatgtgggccgccgtgatggcggatgtgggcgtctgcctgcttgcggtgggcaactccatgcgtattttccgggtgaagctggacatgtgacggggaactctcttcctccccctgtttatgggaggatgcccccatcccgatatccggatgctgccgcggaatcttggaacagcggaagatatcctgataaaaaaacctccgtgccggcgggcggaacggaggacgggggaaaaacaggccgggcagaaaatcttaccgcagccccgtcagcagaagttccgcgttattctgtgtcttggagatattttgcaggagagcctgaaggccttcccatcccggtttcatggcgagctggcggcgcaattgcatgattttgacgaattcctgttcgttatacagcctgtcgtcattgcgggtgccgctctgggaaagggaaatggccggataaatgcgccgttcggaaagttcccggtccaggcggatttccagattgcccgttcccttgaattcttcaaaaatcacttcgtccattcttgattccgtgtctaccaggcatgtggcgatgatggtcaggctgcctccttcttccacattgcgcgccgcggaaaagaatttgcgcggtttttccaatgcattggaccccaggccgccggacatgatgcgtcctcccgtctggttggcattgtagccgcgggccagcctggtgagggaatccagcaggatgacgacgtctctgcccatttccaccaggcgtttggcccgttcgataaccagatcggaaacctgggcatggcgccgggaaggttcgtcaaaagtggaggcgaataccggagcatccacggtttcttcaaaatccgttacttcctccggacgttcgtccagcaacagcacaatcagttccacttccggataattggccctgatggaacgggcgattgttttcagaagaacggtttttcctccgcgcgggggggccacaatcaggccgcgctgccctttgccgaagggcgtcatgaggtccagtacgcgcatggcggcggaattgacccccttgttttccagaaggaggcgttccttggggaagaggggggtgaggcgttcaaaatcgctgcgcgcccggtagtcttccgcagggatgtcctccacgctgatgacggaggctgcagaaaggtacttgtcatgaggccgcaatttgcgcagcctgaccttgatctgctggcctacgcggagatgcaggggtttgatgagattgccgcccagataaatatcatccggagaggtgcggaaacttttcaccggatccctcagcatggcgtaattatccttggcttgttccatgaccccggaaactacgacttcatggccctttgccagaagctgtttccccaattcaaaaaccagctgggacttggtgagggaggccgcgttccggatgggcagcccttccgccatttcctgaagatcgttcagggggcgtttccgcagttcattgatgtcaatctgctccagaacaggggctgcttcctcctcctcccggactgcgtttccactattttcctccggagcggcagccggctgttccccggcggtttcttccggcgcgggcaggggcttggggagggtttcctgcggaatatctccggcgggggaaggggtgttgtcgagttcttcagtcatgaaaaaatgttggtaaagtctttgggtttgctggcggagcaggtccggggggccttcattccagatgacgaagtcggccgcagccactttttccatgataggccgctgggccgccagaatggcttcaatcatatcctcccggaatccattcctgatagccaggcgggttttctgcgttcccctggaaacagccaccacgcacacggcatcttggcaatagcgcgccgaagtttcaaaaaacaggggcacgtcaatgacaaacccgtccacctccgtattctgacgcgccgccagcatttgcgcaagacattcttgatgcagcagggggtgaatgatcccttccagcgttctgcggctttccggattccggaaaacaagctcccgcagaaaatgcctgtcagcctttccggaggagtctacgctggctgggccgaagacgctggagaggggggctttcagcgtaccgccatccagcaatctgcccgcctccgcatcacagtcaaacaggcgcaggcgcgcgcctcccgcctccatcagcagacggatgaatgtagatttcccggtggctattcctccggtaacaatcagggttttcatggggggaagggaaagtaaggcgcttctgggatataaagagcgggtgaaagggttaccctttcacccgctccaatatggacgttatgcacgcagcctacatgggaggcagcaggccttcggaggcgggaagggcgctttccggagcggccgcagtgggaagggcattgccgcgtacgggctggcccgtggcgtcaatgatctgtcccgttacgaagatcatcagattcttcttgatgtggttgtcggagttgctgcggaagaagcggccgatgagaggcaggtcaccgaagatcggcactttgtcttccaccgtctgcacgttttccgtgatcaaaccaccgattgccacggtatggccgtcgtagatgaacagggacgtttcaacggacctcttggagaagatcggctgctcgatgcggttttccgtcagcgtcagggacatcggcttgccgtcggaaccaacgccggtggactggatcgggctgccgtagttcacgaagccttcaaattccacgatgctgggcttgaagttcaggtcgatgatgtacttgttgtctccaatggtaggcaccacttccagagttacgccgacgggcttcatttcaaacacgccgggagtggcgggagtgacagggaagctggatatctggggttggatctgattgcccaacagaccgttcagagtgttaccgttgttcccataaccgtaaccattgctatagccgctgcctacggagttggggagttccggcggttcgtattcggtgggataccagaattcgcggatgatttcaatcttggcggtttcaccggacttggcggtcacgctgggggcagtgagaacgtcagacccttttttctgggacaggccgcgcatcagcatctggaaggagccttcgtcataaatgcccgtcagggacatgatgccgggagcggcgtttttctgggaggcttcagagcggttggtgctgttcagcagattgtccacggagttcttggtgatggcgtagtcacccgtgcggttgccgccggtaacgaggccgttgatggtgtcgctgccgctgtttacaggccagccggtcacgccgccgggagactgggtaaagctgtcggaagtggaaccggtgccgtagttcgtgccaccgcccaggaaggtgctgcggtcattgcttacggagaacggggtgacaatccagtcaaagccgagttcttccgtgttttcctgggttacttccacgaacttggtcatgatgcgcacctgctgggattcgccgcgggtgttttcaatgagctgttcgatcaggtccaggttgccggaagtgttgcggacgaccaaggaggaattgccgttgacaaggaatgccgtggcgccttccgggaagctgatgccgctcttttgcagcaggctgcggatggagggcatgggtttaaggccggaggagctttcgccaccgccgccaaaggggtcgtcactgacttcgccgccgccgtcgccgacggtggtgcggagagcggactggaagcccgggggcacggagaaggtgcgctggtacagatccacgtcattaccgccggcaggaaggatggtcactgcatagtcttccaccttctggcgcaggccggcattgctgcagatgaaacggagcacttccagcatgggaacattagtcagcttcaactggccgattttgcgggtgcggatgctttcctgcggggctgctgccggagcagcttccgtgacttccgcagtttcttcgccaaagccgtcttcatcagttgcgggaacggcgggggcgacggcagcgggctgggaatcattgatgacaaagttgatgccgcgttcaccgttcgggcctaccgtgcggtccagttcaatggactttttgcgcagatagtcaatggcgtcttccacggtggtgtcttcaaaagagacggaggggatgatgatgctcttgagcttcatcagattggccgtggcgccgttgatgtccgtgatcggtgcgttgtcagtgccgtcggctccggtcgggacttccatcgggatggggcgttcccacatcttgtccacttccgccagcatggtgctgcgggtttcgtcgtaagcggctgcatagtaagccattctgcggcggttgaccgtttcctgtccgcggcgggccgccacgttgtacgggtcgatggagagaaccttgttgaattcggcgatggctttgtcgtagtcgccgaggtcatagtaaccataggccatgtgaaggagggtgttcaccttttccacgtttttcacgtgttcgggggtgagcgccggattcgtgcgaatcgggtccttcatgtattcgagcgtctgcttggcaagcttggcgctccggggattgagcttgatggcatcctgcagaagcttgtcggcttcgtcatagcgccccactttgatgtattcctgagcaacggcgatgctggcgtcgccaatatggttggcgatagcttccttgcgctggtcgttgatcggcgcggaaggcagcatgttgtaagcggcgttgtatttgtccagggcttccttgtacttgccttcgcggtacaggttgcggccttccgcaaggagctgcatggcttcctgggtttgcgcttcgcggcgggccatggctgtgcgcgctgcactggactggtattggtaactgcccggtccggcgtaggacgatcccaaggcactggaggttccgacggcgccgccatcaccagcctgcgcaaacgggcaggaggcagcaatggccatcagcgcgatcagggaacgcttcggttgataaagtggtgcgtggtccatagttaggttcttctttttacatgtttttcggatttgtgaagcttttttttcagaaaagtttaaatccggctctattttttcttgctcagtgttgtttgttctccagtggttttgttggcaatggttacggtctgtgtagcattatcaacggttttcagcgtgtagatctgtttggcgtctcccggaatccggaagtcggaaccttcctctacttcaaagctggtatcccgttcggggccggccgtgatagtaaggtttactttcttatcaatgattggaatgacgtattttgttccgcgcctgatggtgtaggtttgtccgtttttggtcggcttcaaatccttgacgacggcttcctcgtccgtttccaccatgtccaggctgggattcttgaattcctttttgacaacgctgacaagttcgaatctgggctcgtcttttgtattcttacgggcgccgaacttgccgttggtctggacgatgtttttccaaatttcctgtttggcgcggttcatacccttaaaggtaaagtcattgccatccgcctgggtgaaagccagatagaagccgaactgcttgatttcgtcgacaaaaagcttgctgacgaggggaggatggctgttggggtcgttgggatgtgttttagccgcatattcttcctgcaccgtaaatccatcgttgtccgggtcccgggtcaggacgtccgagtaaacgaattcattttccagtccgttgtccaggaaccatttgttcggaatgttgccgtggataggcggaccggagatgatgtcaaagggttccattcccccctccttaatccagaggttgggggcgacgaagcccacatacttctgtgtttcctgggcaatcggcttgagttcgtgggaggcggaaagttcctggcctacttctgcggctttcttgatgccgggaggcggttcgatggctttttcagaaacctgcgtggtgaatttgtatttgtcattcagtcccagaaaggtcagcgtaccataggcggccactcccaggcccaggacgattccggatgccaacaggattttgtcgtaattttgtttttcagacatgttgaaagtatttgctgcggttggtgttgccttggttaatcttcagacggttcctgagctttgggctggttgaagtggaccagattcagggagacctggacaaagacctgctccttgcccatgtaaggcttgatgacttgctggatggccggggctgcaggtgcggtcgcctcatccgccggagtcagggaagccgcacccgtggcgggttgggcagcggcaggcttggcggctgccggattggcgatgggagggggcatcatccgttcgttgcggatacggatggagttgaccgtgaacagataatcctgcatgccggttatggcgttcatggctttcaatacactttcccggtcgccctggaaggctatttccagaggcatgggagtccatggagcctggtcggcttcgtccgattcttccggattgttcgccggggtttcaatggggagctgggggcggtacaccttgatgaatttggacaggccgcattccgccagtttgttgaccaggttgttgatggctttcaattcaaaacccagcgtggaggccgcctgaacagagggagcctgggtgctgtaaatctggaagccgagccaggaggatgtgtccgttatgagaatgttctttttcttgcaggaggagatcagggaatccctgaatgttttcagttcattctggaatgccgtgggcgtggtggggaccagcgcggaggaggcaaggaagggcttgtaggccgtttccaggctgcccacggccttggcatagcggttcagttctttttccagctcttcgttggatgagcggctcggagtgatttccgcagcattggcggacttgatttccttggcggcgatgctgatttttttgtccagttcactgcgtttggaattgacgatgtaccctgtcgcggataaccccaggaataagagaagccccacgcccgcgaccatggcggcgggcttgttgtctgtaatccaattgctcataaaatatgtcttgttcgggttgggtaatcttatttgttaaagttcacgggaatgggcgtttttaacggaagcaccagcttgaagggtacaaaggcccctgccgccgcgtccaccttggcgtccttggctcccagttccatgatctggcgggcttccagtttgacgtctccgggcttgaaagtgaacagggattccttgttcccgtctatttttgcctggaggtcctggatgattctctggccgcccaggctgcgccggacgaatccggtcaggcggatggcgttgacgctgtaaacgcccgcttcatcctcgctggatgcgttggcggaggcctccgtcctgatgtcatccaccagggatgtatttttgtccgatgtgaaggaatccttgatgacggagtatcccgtaatttgggtggtatcctccggattgaagtgggccagcggttcaaaatccgtaaaccagtagggataatccttgtgttccgactgttccagcaggtgcctgatgatgtccgcgtagccgtagcgctgaagcgtgagctgctggtaggaagccagggtggagtccagttttttcagctcctgttctttctggcgcagggcggattgtgccgatttgatggaagtaacggtgggctggacgccggcgaggatttcctccgcctttttctctcccatatatcctgtgacggcataagctgcggcaccaagaacggcaatggctgccccgacgatgatggcgggcatttttttctggttggcccgctttttggcaactgcggtgggttctaggtcaatattgagagaggccctgccgatggagtgaatggcggtgccgatcaatccgcccaggatgaaggcttcgcgggagatggtgttcacgtccacgccggaacccacgcctacgttgtgcatggggttgaagaaggagatcggaatgcccagtttatcttccaggaattccttggtatagggcagggaagctccgccgccgcacaggtatgccttgacgggagcgcttccgctcatctgggcgcggtaatggttggtggtccgctggatttctgaggcgagcctggtcatggccgtacggatgacggtagccagattggccgtggcgggatccagtccttccgtttgcccgttgctcatggaaacgagcccgctggtggttttcaagcgttccgcttccatgaaggaaatattgaattcacgggcgatagcggaggttacgaagattccccccgcggaaatactgcgggtgaagaaacgtccctgttcgctgtaaatcaaatccgtggatttggcaccgatgtcgatgagcatgaccggttctttctcatccggataactgtccacatacgcattgtacagagaggtaagcgcgcagtccactttgccggtggaaaggccgtgggagacgatttcatcattcagggagtccaggtcttccgccttgatggcaaccaggatggcttcccgttccagacctttggcgggaagcagatggtagtcccacacgacttcgtccagcgggaaggggacgtgctgctgggcttcaaagcggatgagctgttccacatcggtatcgtccagagccggaagcttgacgaagcggatgaaaacggattgtccggaaacggaatagttgacgacgcttcctttgacgttgagttcctggacgaggtcggcgatggcttcccctattttcgtcaggcgcaagccttctgctgacgggtccagcactacgaggcgcgtagcatagcggtccaggataagggcgtctttggaagtcttggaaaagacgcccattgaaactctctgggaacctacgtttaatgcgacgattggtcgtgaattagccatgggtgatttctgttaaataagatgaaatgatagcattaatggaacgttattcgccgtccgccggggggatcacaggagtaccgaacggggcggggacggaaccggaagccgcctgctggctgttgggcctcataatttccggataacggtcgtaccagaacacggagaaaggcgtttcatccttgttcagcagggggtaataagaggtctccacgatgctgggggactggatggtccaccatttttccatcttgccgcgttcggaggaataagtggcgacaatcttgccgttgtattccaccactacgccctggtacttcacccattttcctcttcctccttccacaccggtaatgcgcttgacggaggacggggagagatacacggaagcgtacgtgttttctcccaccggaacattgacgtatttgacctccttatacagtttcaggtactggcgggcgcggtccggattaactaccgcgatgtaaaatttgaacgtcagggcatcaatatagccggatttgggggtgggagcggcttccaccttgaagggaatttcaaaatccgcccatttcttcggtttcggcagcggccggggatcgtcctgcgtcaggacgttgggggactggcgcatatacagggacagcttttccagggagacccgcacctgcattctgggattgctggtggtctgcgccgatgccgcagggacgaaaagcaccgcagccagcatggccgtgatagtgttaaggatggatttcatagcacaattcgattccctgattagttacaccaaaaaccgaactgtggctagcaaaaatctcttgtttctttccatgtagtgagtgtggagcatgacacggctccgcccggcggttctgcccgggcggtcaagaaaaaaacatgcggcatggctgcgggcttgacctggcagaggtgtttccacatgctcggcccatggcgattgattctgatctgctgaagaagttttcagaggcccacggtatttcggggcatgaggatgaagtgagaagcctggtggctcaggaacttgaaggatatggggaattttcttccgatggttccggcagcctgttctgcaccggcggcggggccggttcccgcgtgatgctggccgcccacatggatgaaataggcttcctggtgcagaatatagcgtcgaacggtttccttcagttggtggggataggcggctggtggccgcataccctgttaagccagcgtgtcctggtaaaaacccgctcgggccgcggcatccggggggtgattggttccaagcctccccattttctgccggaaggccagcgcaacagcgtcatgagcatggaagccctgtttgtggacgtgggcgctgaaagcgcggaacaggtgaagaatgaattcggtattcacctgggggatcccgtggtgccggacgtgaaattctccccgttggaaaatccgttccgggtcatggggaaagcctttgacaaccgcgccggtctttctgtgatgatagaggcattcaagaaattatgccgggaagggcatcccaacaccctgattgccgccgcgacggttcaggaggaggtgggcacgcggggcgccaggacggctggcgtcgccatgcaaccggattgcgtgattgttctggaagggccgccggcagacgacacccccgggtttgccgtgacggattcccaaggggccttgggtggaggcgtgcagatcaggctgtttgaccccacggccatcaccaatccccggctggccgccctggccgaaaaaacggctttggatgcgggcatcccattccagttgacggtgcgccgttccggcggaacggatgcggcggccctgcatctttccggaaagggtgttcccactattgtgctgggaattcccacccggtacattcatgcccataacggcgtgctggatctgcgggactaccgcgccgcggtggaattgacggtggctctggcccgttccctggaccaggaggccgtggaaacccttacccactacctgccctgaaagaaacgctcatgaatccgaccgtttacgtacatgacctggaccctgtcatctggcagataacggactcaattgccctgcgctggtatggcctggcctatttaatgggcttcatcggcgggtattatctgctttcctggctttcccgccggaagctgtatcctgtcccccaggacaaaatgtcggattttgttacttatgtggctatttttggtgttttgattggcggaagactgggatatgtgctcttttaccagattcccaaccacggctggtcccagtttctggcggatccgctcatggtcctgagagtgtgggaagggggcatggccagccatgggggaatgattggagtggggctgtatacattttattatgcgtggaagcaccgcgtcaagtgggtggcgcttctggacggcctggccattgttgctcccgttgggctgtttttcgggcgcatggccaattttatcaacggagaactgtatgggcgcgttgtcccgcccggctcttcccagggaatgatttttccggcggagctttcccaggatccggacttgttcgtgcgggtggcttcccgtatttatgaaacgcccggattgctggacaaactgtccctttccggcatagccgtgccggaacgaatgactgccgcctgggtgaccgaccgggtgagggatacgcccgccatcagggaaatcgtggggcggatgatgcaggatcatgcacgctacccctcccagctgtatgaagcgtttgcggaaggtgtgcttctctttgccgtgctgtggtttgtacgggtaaggttccctcgtgcgtggaacggcttgttctgcggtatctttgccgttctttatgctgcgggcagaattatttgcgaagagtaccgggagccggattcccccttctccatgggattgacccgcgggcagttcctctccgttttcctcgtgctggtgggcgccgctttcttcgtatatgccttcaagaccaggcagacggttcaggaatgcgctttctatgaacctgaaaagaaagacgggaaagaatcgtccggaaaggccgtttaaaacgggtccaggtcaaattcccctgttttgggaatactgctggcgggaccagccttgaaaatatctgcaatgcagttggaaaaaagccgcaaattccgttggtcgaaggcaaaacgttcaaattccttgacggaaaacagggtgatggggtccgtgttgtaagctttgaattccatgatgccggcgtccgtattcgtatttgacaggcgtccctcaatgcctacgtccccgctcatgaagcgccccaggatcagggaggttcccggaaggggggagaccagggaaacaagatcggacatgatgttgccgcccacgtccgtaggcttcagcttgactatggcgaggcggagagttacggatcccggaacggggcggtcaaccaactgccatttcatcctcccgcctgtctgtttagatttgttttccagcacgttgcggatgtctttttgcagcccggccctgaattgtgccgccagcgccggggattccttggggaatctggctttgatgtagtcaatattgacgggggctacatatacttttagccttggggaattccagacggcctgttccgagggattataccagacgcctccaaaacaactctgcctggagtccgtgtgaaggggatgggtaatcaaagaggaaacgggcattgtccgggaactggaacaggaaaaaaccaaacctgttcccagcgccaggaatagccgtggaatagcgccgtgcatgcaggataagacggcatccgcccgggtggtgttcgagtcatgacccgattggctccgggagttttttccggagggggtgtctccggaaattccggggcggttccgtgcttccttcaacggtatgcatgatgaacggacgggtagcgggacggcaggaaatggacaatcgcataagaataggccggagcggggaaacggcacggtcagaagaactccggacgacaaggagacgcgcaaggttgccccgtgtccggatgcatgattgacaagccggaaaagcggggcatgctgttgatatgagatacgagccgcttccttcttccttttttgccggcaaccgtgaagaacttgcttcccgcctgcctgccggcagtatgctgattctgcacgccaacgacgtatttcctacgaatgcggacggcacttttgccctgcatcagaatgccaacctcttttatcttacgggagttgaccaggaagaaaccgtcctggtcatgactatccgggagggcggctgggatgagattctgctgttgcgtgagacaaatgaacagattgccatctgggaaggtgcccggctctcgcaggaacaggcgagagagctgagcggcatccaggacgtgcgctggaccgatgaatatgatgcgttgctggaggccctggtgccgtccgcatccatggtctttgtggaagccaaccagcatccgcgatgcacatgcccggtggaaacgcgcaatgcccgcatgaccaaggagctgaaggaaaaattcccggacgctgttttgaagaatgtctatgaaatcatggcggatatgcggcaaatcaaaaagccggaagaaatcaaggctctcaaaaaagcctgcgacatcaccaatgaaggcttccgggaattgctccggttcatcaggccgggggtgggcgaatggcagattgagggattcctggccaacgaattcatcagccgcggtccgcgtaaattctccttcctgcccatcatcgcttccggaaaggatacctgcgtgctgcattatatccaaaacgacaaacggtgcgaagacggcgatctggtgcttatggacataggcacggaatacgggaattacaactccgacatgacccgcaccgttcccgtgaacggaaaattcaccccccgccagcgcgctgtgtatgaaagcgtgctgaatatgatgacctacgccaaaaagattctgagacccggaatcctgaaatcggagtacgaacgcctggtgcgcgtttttgctgccggggaactcgtcaagctggggctcatcacacccgcacaggtggcggaaaaaccgtccgatcctcccattgtccggaaatattacatgcacgggtgttcccacttcctggggctggatgtgcacgatgtaggcgaagccaaccccgttgtgttgccgggcatggttttcaccgtggaaccgggcatctatattgcggaagaaggcataggcatccgtttggaaaacgatgtcctgatcggggaaacagaaaatatcgacctactgggagacgtgcctctgctgcctgatgacattgaacggctcatggcccggtaaaatgggccggattcggttctaaacttgacaatgaggcccgggtgggttttcattcccgtcccatcatgtcgaagaaactcaaaatagctcttcccaaaggcagtttgcaggattccaccgtggaattgttccgcaaggccggctacaatgtttatgtgtccagccgcggataccgcccggcctgcgacgacgacgatctggagctcttcctgatccgtgcccaggaaataggccgttatgtcaatgacggtttcatcgactgcggcattaccgggcgcgactggatttatgaaaacagggcggacgtggaagtgctgacggatcttcaatactccaaggctacctccaagcctacccgctgggtgctggtagtcccggaaaattcccccattacctgtgcggaagaccttcagggcaagcgcatcgccacggaaggcgtgggcatcacggaacgctggcttcaggaaaagggtattgaagcccacgtggaattctcctggggagctacggaagtgaaggtgccggaactggtggacgccatcgtggacatcacggaaacgggaagctccatcaaggccaacaagctccgcatcgtggacaccctgatgacctcctatccccagtttatcgcgaaccgggaaaccatgcaggacgagtggaagaaacagaagctggaacgcctggtcatgatgctcaagggcgctctggaagcgcgccggaaagtgggcctgaaaatgaaccttcctgctgcttccctgaacggcctggtagaggcccttccgtctctgcgccgtcccactatttcccatttggcggaagaaggctggctggccgtggaaacggtcattgacgaatccgttgtgagggatatcattccccagctcaaggccctgggagcggaaggcatcattgaatacccgcttaacaagctggtttactagatttttttctcaccacagtaaaacaacaaacgaaccacaatcatgggatcgctcaaaaaacgccgtaaagcaaaaatcaacaagcataagcgcagcaagcgcatgcgtcagaaccgtcacaagaagcgtttgcgttacaagtcctaaggtttgtgcgcttcgctgctcaaactggcagtctgtccgatttccggaaaattccggcgtcctccttatcacggaaggacgccgttttttatgtatttgaatgagccaaaaaatattaatttgatttcatgttgaaatagatattgatgttttcttttttttcaatagattaggaagtaagttatgaggcgtgtgtttattttgataatctctatattactgttttttcagggaaatgtcttggctgctgatcagccaagatgccgtgtagaaagaagatatcttgccttctttactccttggggtaaagagcctcctactccgcctgacattgttgaggaggcattgggtgatatggtggaatctattcttactgaagctctaggcgcagaaacagggatagtggatatggatcatctagtaggggcctccatgaaacatacttatcatgttcatctatggtatgcctacagatttgttcataatcataaatttaaaactccatggaaaacggggatgaaaacacatttagctgatgggatgaaggatttttttgatccgaatattgaagggaaaaaaagtgctcaaaatgccgtgtctacagcaaaaagagatcttcttaagaaatttgaaaaggaacttaaagaagaatgtgaaaaacatcattgataaaatattatgaaaaaaattatattaataaacctcattttactttctacagggtttctttatgcacatgaaaaggatatgatgaataaagttcctagggatagcaaagtcaatttggaaaagaatgactcttcttcccctgtcgttgtagaaggtgtaaaaaaccgtggagaactggatagctggattgaaaattatgtggaaacaaattatcctggttataatataggtgacagggaagtggatctttccagtaagaaatcaatcattgaaactgtgtatttaaaaaacgaacagggaaatgtaatagaagtgtgttttgatattacggattatcgaaagaaatttaacgagcttcataaaaaagaaattattaaaatttctagagatctccggaaacaaaaagaacgtgtaaaagaagataaggaaccaggaagttcttatgattttcccattgaattgaaagatgctaaaactgagaaggaagttttggaagcacagaagaattatttggagaaaaattttcctggttatcaagtaatttcaagagcaacatgggtatttgggaaaaagtttattgatcgagtccggttggaaaaagaggatgatactagagttttgatgtttgatgtatcggctcatattaatgaatacagaaagacccatgagattaatttgaaagaaatcgctcctggtatgattagtgtgcaaaaatgaattttaatagtaagaaattattttagagaagtatttgttgcgccaatgcttgatttttatttttgtgtatatgagataggattgatgagtaaattttagaagttttttgcctatagaatatttattaaaatataaattaactgattaattataaatagaatataataaattaaatgttccatattttaaattgagatgcataattgttatttttaacgtttctgtgtttaaatttctgttcttttctctgtattttttatcagtggttgctgctgaaaatttatcctatcagcgtctggcatggcagatggagggaggggatgtacggagtattgccggactgtgtcgccaatatgtacaaaagaagttggaggcggaaaaaacgttttccgtggaatccctgttgaaggatcgggagctggcgcaggcttgctatatggcccatttctttgcgttggtggggaaggataggacttacatccttcatgaattgaaggacaaggagtatgttctgtggctgttgaatcatccggaagtgtttgagaagttgtcatttgccaaggcttcgggaaaggatactctggcagtcctgcgcaacatttggctgaaggaagggaaggaactttccggggttggccttaacatggcattgggggcggcgttggtttcttcatctcgggagccggaggcatgcgaagcgcggtatgatttttacaaaaagtcttttatggagaaaaaactgtttccgcagttccttacgttggagccgtgggaattcggaattcttttccgggggcgggaaagtattgaggaacttgcctgggcgcaggattatctagccgacaaaaagaagatccaggcggggaacgccgggtatgcctgttgcggattgattccataccggatgaagaataaacagggaatcagtgtgcatgtgggtggagcgttttacgatcacaaaccggtttccttacagatttacgtggaatatggaggcgtgtgcggcgccgtttccaaaggggcagccggttttgtgaaagcgaagggaattccttcctatacgattggccagccagggcattgcgcctttgtgtggaaagggatagacggagaatggaagataggaaataacatttatggatgggtgtggtcggagggcggttctggagggccttggaagggagccgtttccacgattacagagcttccccgtttttggaagaagaatgccgctgcatccaatctctgttattatttatccctgctggctgccgatccacagaaggcgggcacattactgaaagaagcgttgaaacggaatgcttccaattatcctgcgtggcaggctttgacgaagagaaatgcaaagcggtccgagaaagaaaaactggttttgctagaacagttcaaggaagctttctccggaaatcccaccatgtgggaatactttctgaaaaaagaactggggcttgattggaaaaaagcgaatggttatgccgtttatcccggattgctggctgaaaatgaatcgtgggattccgtggatgcctacatgcgtaatttttgcgctttagcccggagggatattcccgacatggccggaaagttgtcttatgaagtgaaaaccaagagaatctttttcaaaaactggctgaaattttaccagcagaataaagtagatcggaaggtgagagttcagacctgtgccgtcttggaaaaggcattgcccccgttgttgacccacgaaaaaacggctcttcaatttctcggattttatggtcagatacttgacttgtggaaagacaaacagctgtctgcgcgggccgatgcttgcttgactgcatggttgaaggaggcagacaaggcgcctgtacgcaaaaaggtggcagaaatagggctgaaagtagccactcatttagaagacaaaagggcgcttgtccgttatgcggaggctcaggaagaacattgaacagggttgtctgaagatcaaggatgttgttgtaatacagaagatggagaatcggctcaagtatttaataatgatttccagaaaggaaaatttgcgcaacaagcaaaccttctatttaaaggcgtttcagtgttatattccattatgtcgatttgttagcagatgtttcaatcgatacctgtgatagttgccgtatcctcttttcttcccggaatcttttcaggggaatggtgatggtaaaaacagtttcccggtgggggatgctggagacggtgatggcgccgtcgtgcgcttccacggcgcgtttcacgatggaaaggcccaggcccgttcccctgatttccgaggagtggtgggtttccacccggtaaaagcggttgaaaaggaaggggatgctttccgcaggaatgcccacgcccgtatccgtgacggtgatgacgcaggcgtcctgtgttttggcggcggccacagtaatggaaagtcccggctccgtgttttgcttgagggcgttttccaccaaattgaacagaatttgcgtccagtaaaaggggtctccataaagttcccaatccgtgggaatgtccatgtgcaggacggcctgttttttctcccggatggaatccagacgggagaagacgtcgtccgcgcaggaggtgaggcggaaccactgctccttcagaatcgccttgtggcctgattcgagtttggagatcatgagcatgtcttcaataatgttcatcagcctctggctgttctggtgcatgactccgatgaatttgcgggccagtccgggactttcctccaccagatcgtcctccatcaggttttccagatatcccacgatgatggtgaggggcgtacgcagctcgtgggaggcgtttgccacgaagtcccggcgcatctggttggtgaggtagttctgcgtgatgttgcgcagcaggatgcgcttttctctgattggggcgtccgtgatggcgctgtccagatgccacgccgtgatgccgttttgcacgccgccgggggaattggcggagctcagcgtgaattccttggtgacggggccgtccgtatcgaatgcttcctgaacatgccccagcaattcctggttgcagaccagggcccccactttgcgcccttccagcttttcttcctgaaagagttctttggccagcgtattagccagcacgatgtgtccggatggaccgatgagcaggaaggcctctcccagagcttccaggaagcgccgtttgtccgcgatggcctgttcctgcgcttcttccccgcgcttcagcaggcgctgagcgtcccgcaaggcttttttccgggctttcatggcggaccggcatacctggaccagatgccagttcaggtacagggaggccagaataaggatggttaggatgtagtcgatggccgacatggaaccggagtgttaagccttttcctccgggatgcggcgtcccggcagggtaaagcggtagccgatgctgcggacggtttcaatgcagtccgcatagggagccagtttctggcgcagccgcttcatgtgcgtgtccagcgtacggctctgggcctggtggctgtacccccatacgcaactgagcaggtcgttgcggttcagggtctggccttcccgttcaaccatatggatcatgagcttgaattccgtggccgtcagatctacttcctccttgtcgatatagaatttgagggcgtttttgtcaaaagtgaaggggccgtattccgcaatgacgctgcccggcgtgtgctcacaccgtttcagcacgctggccacgcgcaggacaagttccttggggctgaacggtttggtcacatagtcgtccgctcccagttccaacccctggatgcggtcttccgcctgggccttggctgtcaggaagatgacgggaatgttctgggtgcggctgtcccggcgcagttctctcagtacgccgtgtccgtccatgcccggcatcatctggtccagcaggatcagttccggcttgtcccggcgcgccacttccagcgcggtcaggccgtcataggccgccaggggcgtatggcccgcacgttccagattataagccacaagatctgaaatggcgtggtcgtcttcagcgataagaatggttgccatgtctgttttttacgatgaaagaaagggcggtgtcccgatattagatgtgacgattcgttcacatttccccgcccgggaggcggttccggacagttaaagcctcttcttatgcaaacatactgtaacggaagcgtttccgttttgcaaggctggcccagattcaacttctcttccctgcgtcatgtgatacacttgccccgcaacagttgtattgttatgcgaagcgatagagttaaagcagggttcgagcgtgcgccgcaccgcagtttgatgcgtgccaccggaatgacggatgaggatttaggccgtcctttcattgccatttgcaattcttttaatgaagtgattccgggccatgtccacctgaacagggtggccgccctcattaaggaggaggtacgcaaggccggaggaactcccgtggaattcaaccttcccggcgtttgtgacggcattgccatgggccacggcggcatgaagttttccctggccagccgtgagctgatcgcggacagcgtagagacgatgctgagcgcccacgcgtttgatgccatgatctgcatccctaattgcgacaagattgttcccggcatgattatgggcgccctgcgctgcaatattcccactattttctgcagcggcggtccgatggccgccggcatggcggaggacggcacggtgctggacctgaacagcgtgtttgaggctgtcgcccgctttaaggcaggcaagattaatgaggcggaacttcattccctggaatgccgcgcctgccccggcgccggttcctgctccggcatgtttacggccaattccatgaattgcctgagcgaggtgatcggcctggcccttcccggcaacggttccctgctggctacttcagaggaacgaaaggagttctggaagcagactgcccgccgcgccgtggagatggcgaaggcggacggccccctgccgcgagacatcgtaacccgtgacgccatcgacaatgctttcacaattgatatggccatgggcggcagttccaataccgtgctccatacgctggccattgcccgggaagccggcgtggaatatgacctccagcgcatcaacgatatttccagacgaacccccaacatctgcaaggtggctccttcctcccgcttccacatgcaggatgttttgcgtgcaggcggggtgagtgccatcattcatgaaattgccagaattcccggagcccttcatctggacgccatgaccgtcagcgggaaaacgctgggtgaaacagtggagggatgcggcattgcggatgaaaccgtgattcatccgttggaaaatgcctattcccgtgatggcggcctggcgattctgttcggcaatctggctgaggagggcgctgtggtgaaaaaggcgggtgtgcatccggatatgatgagtttccgcgggcccgccgtgattttcgagtctcaggaagaggcctgtgaaggcatccttgccgggaaggtaaagtccggcgatgtggttgtcatacgcaatgaaggacccaagggcggccccggcatgcaggaaatgctggctcccacttcctatattatggggcagggccttggcgcggaagtggcgcttattacggacggccgtttttccggagccacgcacggagcctgtattggccatatttccccggaagcggcggaaggcggcctgatcggcctgctgagaaacggggatatgattgagtattccattccggaccgcacgctgaacgcctgtttgagcgaggaggagatcgcacgccgccgtgcggattggaaacctacctataacaaggtttcctcctcctggctgagccgttaccgccagctcgcctcgaatgccagcaagggggctgtcctccggcgcggggaataatagctcgtattattcgacttatcccaaccaaatttcagccgccttcctccttaatg

SEQ ID NO: 19 - DNA, 36315 bp, Akkermansia muciniphila
  source 1..36315: mol_type = genomic DNA
cgaattttcaatccgcttttcctcttttcgtgaaataacgcggagaagacataaaaaagaccgccccccggaaacggggagcggcccttgaagtgtgggtggagagaacaggttagcgttcgttgtcgaagttgatggtatcgttcaacatgttttcggcaagttccgccgcttcctcttcttcgctggccgacgcgatttcttctgcgccctctgcgggttccacttcaatcttgctgtaacgggagaatccggtgccggcgggaatgaggtggcccatgatgacgttttccttgaagccttccagcgtatcggtcttgccgagggtggatgcttccgtcagaacgcgcgtggtatcctggaaggatgccgcggaaatgaaggattccgtttccagggaggccttcgtgatgccgagcagaacgggcttggctgcggccggttggcctccctgggctacggtttgttcattgatgcggtcgaacgtagtcttgtccacctggtctccccacaggaattcggtattgccgggttccgtgatgactaccttgcgaagcatctggcgcacgatgatttccacatgcttgtcgttgatttccacaccctggaggcggtacacttcctgaacttcgttgacgaggtgttcctgaaggcgttccttgccgcagacatccagaatttcttccggagagacggggccttccgtaagctggtcgcccagatgcacatggtcgtcttcatgaacgataacgtgcttgttcatcggaaccagatgatccaccagttcgcccgtgggtgtttcaatggtaatgaccttcttgccgcgggaggtattcttgctgctgaggcgcacaatgccctccacgcgtgcaatggtgcaggcgtccttgggcttgcgggcttcgaacaattccgccacgcggggcagaccgccggtgatgtccttcgtcttggctaccttgcggggcgtcttggccaccatcgtgccggcggagatggtttccccgtccttcacggtgaggttggcgcctgcgggaatggcatgatgagccagaacttcacgggtcttggcatcgcggatgaccacctgcgggtgaagttcctgcttgtgttccatcacgacaagagaggaggcgccggtttcccggtccgtttccttggaaacggtgatgccgacgatcatatccttgaattcgacgatgccgcccttttctgcaatcacgggcacattgtacggatcccaggtggcgagggtttcatccttcttgatagcgccgccgttgggcacgtacaggatggtgccgatgacgggctggtaggattccagttcgcggccctgttcgttttcgatgcggacggagcagtttttattcaggacgacgaagttgccgtctgcgttttccaccgtgcggagatcttccgtgtagatgacgcggccgtcgttcttggctttcacaatgggctgcttgaacgccgtggtggccgttccgcccacgtggaacgtacgcatggtgagctgcgtgccgggttcgccgatggactgggcggcaataatgccgaccgcttccccgatcttcacttcctgtccggtggccaggttcaggccgtagcacttggcgcagcagcctttcttgagttcgcaggtgagcacggaacggattttcagccgttcaatgccgattttttccagttgttccgcctgcttttcgttaatgaggtcgttgatgtccacgataacctcgccgctgacggggtcaacgatgcgttcgcaggaagtccggccgtagatacgggaggcaagggacgccacttcttcgtcgccgtcataaatggcgtgaacggtgatgccgttgctggtgccgcagtcttccgcatggacgatgacatcctgggccacgtccacgagtttgcgggtcatgtagccggagtccgccgttttcagggcggtatccgccagacccttgcgagcgccgtgggtggagatgaagtattccagcacggaaaggccttcacggaagttggccgtgatggggcgttcgataatttcgccgctgggtttcgccatcaaaccgcgcatgccggagagctgcttgatctgcgccttgttgcctcgggcgccggagtccaccatcatgaagagcgggctggccatcttggagccttcgttgtgttccagcttgcggtacagagccgcctggatgacatccgtagtctgagtccagatgtccaccaccttctgatagcgttccccatccgtgatgataccgttcttatactggcgggtcaccttgtccagttctgcataggctttttcaatttccgtctttttctgggagggaaccaccatgtccacgatgccgatggagcagccggaacgggttgcttccttgaagcccaggtttttcagggcgtccagggtctgcacggtacgttccttgccgacggtctggtagcagcgccagataatgtcgcccatctgtttcttgcctacgttacggttaatgtaaccgagttcccggggccagatttcattgaaacgcacgcgtccggcagtagtgatgataaccttcttggtgacatccccatacaccacttcggaaggcttcttgccgtagtccgggttgtgcaggcggatccagtcatggtagccgatcttgcgggcggcaatggcgtattccacctcgtcgatggattcgaagaggggaagatggtgatgattatcctgattgttctgtacttccgcagcacgggtgtgtgtcaggaagtacgcgcccagaatgatgtcctgcgtgggtgtggcaatgggcttgccggaggcaggcgagaaaatattattgggcgccagcatgagctggcgggcttccatctgcgcttccacggacagaggcacgtgcacagccatctggtcgccgtcgaagtccgcgttgtacgcattacagacgagcgggtgcagacggatggcggagccttcaatcagaaccggttcaaaagcctggatggagaggcggtgcagggtgggcgcgcggttgagcatgaccgggtggcccttggtcacttcttccaggatatcccacacctccggcgtcttgcggtcaatgagcttcttggcggagcgcaccgtgtgcacgtagcccagctctttcagacggtggatgatgaagggctcaaacagaatgagcgccatcttcttgggaagaccgcactggttgagtttcaattccggaccgatgacgataacggagcggccggagtagtccacgcgcttgccgagcaggttctggcggaaacggcctcccttgcccttcagcatgtcggagagggatttgagggggcggttgccggcgccggtgacggcacggccgtggcggccgttgtcaaacagggcatccacggcttcctgaagcatgcgtttttcattacggatgatgacttccggagttttgaggctcaggagggttttcaggcggttgttgcggttgatgacgcggcggtacaggtcattcaggtcggacgttgcgaaacggccgccttccagaggaaccagcgggcgcaggtccggaggaatgacgggcagaacgttcaaaatcatccattccgggcgtgtgttggactgaaggaacccctgggccagtttcagacgcttggcaatcttgcgtttgttctgtttggagttggtattgtccagctgttcctgaagatccgcgacgagggtgggcagatcaatggccgccagcattttctggatggcttccgcgcccatgccggcttcaaagctgtcatagccgtattcgtcttccgcattgcggaattcttcttccgtcaggatggcccccttttccagaggggtactgccgggatctaccacgatgtagtcttcatagtaaatcacgcgttccaaatggcgggctgtcatgtccagcataaggccaatgcggctgggcatgcatttgtaaaaccagatatgggaaaccggaacggccagttcaatatggcccattcgttcgcggcgcacgcgcgcgttggttacttccacgccgcagcggtcgcaggtgatgcccttatgcttgatgcgcttgtacttgccgcaggcgcattccatgtctcgggtgggcccgaagatgcgttcgcagaacaggccgcctttttccggcttgaacgtgcggtagttgatggtttccgggttgacgacttcaccgaatgaccagctgcggatggtatccggatccgccacggtgatggcaacctggtcaaaggtccggggcttgtcgctcaggccgtgcatttccctgatggtgggggtgtcagacatatattgaaagtttaaaggatgtttggtgcccgcccccgcgttttgcggcacgggggcggaatgcggtggatattagaatttgaggtcggagaagtcgacgtccgccaggccggccatgtcgtcgctgtcaaagccttccgtcatgccgtccacgggagtgagatccgtgccgccgagttgcagggagggttgttcatccttgctgccggggcgtacgttcagccccagggactgcatttccttcatcagaacgttgaaagattccggagttccggcttccagggtattatcccccttcacgatggattcgtaaatgcgggtacggccctgaacgtcgtcggacttgacggtgagaagttcctggagggtataggcggcgccataggcttccagcgcccacacttccatttccccgaaacgctgaccgccgtattgggccttgccgcccagaggctgctgcgtgaccaggctgtacggacccacggcgcgggcgtgaatcttgtccgccaccaggtggttcagtttgagcatgtaggtctggcctaccaccaccgggttatggaaaggttcgccggtcaggccgtcataaagggtactcttccctcccacggtgccgtccttgccgtcaccgatccaggtgaaaccgtccaccttcttggcttcggacatgtaattccagatggtttcttcactgatcccgtcgaacaccggggtagccaccttgaagccaagggccctggcagcgatgccgaggtgggcttcaagcacctgccccacattcattcgggaaggcacgcccaaggggttcagaacgatatccaccggagtaccgtccgcgaggaagggcatatcctgttccgggacgattttggcaacgacgcctttgttgccgtggcgaccggccatcttgtcacccacgccgagcttgcgcttggcggcgatatatactttaacttccttcagtccgccgggttcggattcgtccccggattccatctgatccagcctgtgttcccgttcgtcatccagttccgtaaagcggccttcaaacgaagtgatgatttccagaatcttgttgcgaatcgggctgggttcgatttcgatgtggtcgtgaaccagggccagtttacgcaacagggtcttggtgattttcctgttggccgggatgatgatttcaccggtctgttcattgacgacgtccagcgggattttttcacccagaagaatatcggagagcttcttggtcaactggtcaatgagctgctccttcttctttttatgttcgtcgttgattttcttgaactgctttttcttttccgcgctgtctacgacgaggtcgccgcggtggtggccggagcctgtggaagaaatgcgcacatccatcacgatgccggtgcagccggaggggacacggagtgaggtatctttcacttctgcggccttttcaccgaaaatggcgcggaggagacgttcttccggagccagttccgtttccgatttgggggtgattttgccgacgaggatgtcgccgggcttcacttccgcgccgatgcggatgacgccgtcatgatccaggtttttcagggcttcatcaccggcgttcgggatatcacgggtgatttcttccggacccagcttggtgtcacgggcctgaacttcaaactcggagatatgaatggaagtgaaggtgtcttccttcacggttttttcggagataacaatagcgtcttcgaagttgtaaccgttccacggcatataggccaccagaacattgcggccgagagccagttcgccctggtccgtgttcgggccgtccgccagcacgtcgccggttttgattttgtcgccgcggcgcacgatcggacgctggttgatgcaggttccggcattggaacgcatgaacttgcgcaggggatagacgtaaacgccattgtcgcggtccgtgcgcacactgtcgggatcggacaggaatacttccggacgcacgggcagttccccgtctttcgtggtgataatgacttcagccgtggcggaggccacgatgccgtccgcttccgccagaacgacggaacgggagtccctggcgcactttccttcgatgccggttcccacgtatggagattccgctaccatcagaggcacgccctggcgctgcatgttggagcccatcagggcgcggttggcatcgtcatgttccaggaaggggataagaccggcggcgatggaaacgagctgcttgggagaaacgtccatgtaatgcacgtctgccggatccacttcgatgaattcgcctttttcacgggcggttacgcgggaggtcgtgaagttgccctgttcgtccagcgggttattggcctgggcgatgagatagccttcttcctgatcggcggtgacgtattcgatggtattggtgaccctgccattttccaccttgcggtaaggcgtttcaatgaatccgaattcattgatgcgggcgtaggtacacatggagttgatcaggccgatgttgggaccttccggcgtttcaatggggcaaatgcgcccgtagtgggaggggtgtacgtcccggacttcgaatccggcccggtcacggttcaggccgccgggccccagggcggaaagacggcgcttgtgcgtcaattccgcgagggggttgatctggtccatgaattgggagagctgggagcggccgaagaagtcgcgcacgacggcgctgagggccttcggattgatgagtttgctgggcgtgacgccttcaatgttctggtcaatgagggtcatgcgttccttgaccaagcgctcggtgcgggcaaggcctacgcggcattgattggccatgagttcgcctacggcacgtacgcggcggctgcccaggtggtcgatgtcgtccaccatgccttcgcccttcttgaggcgcaggaggtatttgagggcggccaggaaatcttccgccgtcatcaggcgctggtccaagctggtgtccagcccgagtttctggttgattttgtagcgccccacgcgggtgaggtcgtatttcttgggatcgtcaaaaagcctcttaagcagggtgcgtgcctgagcggcagtagcaggatctccgggacgcaggcgtttgtagatttccttgagggcggattcttcgtcgtgagcgggatccttcttcagggttttgatcagcacgtcgtcctcgctctggtcaatgacgtcgattttcttgatgccgaactggaggagctggcgaaccacacccatattgagctgttcgaaagccttggcaagaaccaggtccttgtccttgatcgtgtccacagccacaaggttgtgcagatcttcttccgtcatgtcttcgctcaggggaagcgtgcggatgttgtagaactggctgacgatgtcacggtccgttttgaagcccaggtagcgcataaacgtcgtcgcaaggaatttgcggcggcggcggcggcggtcaaggtaaacgtaaagcaggtcgttggtgtcaaactggacctccagccaggagccccggtccgggatgatgcggaaggagtggagcagttttccgttcagatgctgggcgctttcaaagcaaatgcccggggaacggtgcagctgggacacaatgacgcgttcggcgccgttgatgacaaaggtgccgcggttggtcatcatggggagttctcccatatagaccgtttcttccttggactcgttgtcggatttgagcttgaaggtgacctgaagggcggcgctgtaggtttcccccgcgcggatggcctcgtaatcgctcatcttcggctgttcaatgtcataggagacgaagtcgagctcaatgttttcgtcatagctcttgataggaaagatttccttcagaacgccttgtaacccgatgtttttcctggccgcggccggcgtgtcctgttgtagaaaatcgaagtatgattgaagttgaatctcaataaggttcggaggttcgatgacttccttgatattcccgaagtagagtcgctttgacatgggctgctgtggcggagatgttatggtttgcatcctgaaaaacccggatgccgggttgggcggttctttccctgggggacggaaccgactggaagcgttttacgaaataaaaggcctctagtcggtcacgcgggatgtgaagacgaggaagcgcaacaggagaaaaacggcttttctcctgttgcgcgggaagtaaaaagcttacttgacgtctaccttggcgccagcttcttccagcttggccttggcggcgttagcttcgtccttggagacagcttccaggatgacggcgggagtgccttcaaccagtttcttggcgtccaccaggccgaggccggccttcacttcgcggacggctttaattacggcgatcttgttggcgccggcttccgtcaggacgacgttgaattcggtcttttcttcttcagcttcggcaggagcggcggcagcgccggcggcagctacgggagcagcggcggaaacgccccacttttcttccagaagcttgacgaggtcggcagcttccaggatggtaagggtgccgagttcttcagcgattttgttaatatcagccattgtattgttttctagtttggtttcgagtcgcgccaagagccaacttggcatttcagttctccggccggagttccgacaaggaacctgtaggagagtcgggtccgattttcacacatttggctagagtgcaaccggaccgtccggtcaaggggttggtattaggcggcgggttcttcgctgccgccgttttctttgtccacatatgcctgaataactcgggcaagagcggaaccggccgcgttgatagtgccaaggagtttggcaagcaactggtcgcggggaggcagttcgccgatggcgcggatttcatccgcggaaagaatggctccatccaggatcgccaccttgtattcggctttcttggaagccttggcaaaggtgttgatggccttggcggcgcctgctacgtcggatgcgccggtcacgaaagcggtctggccgacgaggtgttccccaatgtcgggaaggccggcatccgtcagagccgtgcgcatgaagttgttcttggctacgtggcactgagcgccgcaggcggccagggcggaacgcagattggtgaactcaggcacggtgatcgaggtgtagtccacgacgatcaggaacggggaggcgttgacgcgagcggtcaggtcgtcaatgatgatacgcttgtcaggattcatggtgtgctaaatcggttcgggttacagtttggcgatggaagcagtgtcaaccggcagaccggggcacatggcgcatgaaacggtgacagattcgatgtaggcgcccttggcggaagccgggcgggccttgacgacggaatcaatcagggcagcgatgttttcggcgatgctttcgttggagaaagacagcttgcctacagcagcggagatattggcgttcttgtcaaccttgtagtcaacgcggccggcctttacttccttcacagccttggccgtatcgtccgtgacggtgccggttttcgggttgggcatcaggccgcgcggacccagtacacgggcaaccttgcgaacctccgtcatggcgtcgggggtggcaatggccgtatcaaagtcaacaaatcctccctggactttcttgatgagatcttcaaaccccacgaattcggctccggcttcctgggcggccttggcggcatcgccctgagcaaagacgaggacgcggacgtttttacccgtgccgttaggcagggaaacgctgccgcgaaccatctggtcggatttgcgggggtccacagtcaggtggaaggagacggtgacggtcgggtcgaatttcggtgccgggaaggatttcatggtttccacggcttccgtgatgctgtagttcttgttagggataacaagcttggctgcttcttgatatcgcttgctgcgtttggtagacatgtgtgtatttggcagtgcgttcggactggtttaatcctcctgcggtgagtgttacataccttcaacttcaatgcccatctggcgagcctggccggcaagaatgcgggcggcgcgttcagggtctttcgtgttgaggtcagggagtttggtgttgacaacttccatcagcttggccttggaaagggtggcgactttctttttgttcggttcgccggagccggaggcgatgcctgcggctttcttgagaagcacgctgcccgggggctgcttggtgatgaaagaaaatgacttgtccttgtaaaccgtgatgacggtcggcaggagatcgccggcctgcttttgcgtggcggcgttgaactccttgcagaatgccatgatgtttacaccggcctgaccaagtgccggacccacgggcggggaggggttagcggctccggcattgatctggagcttgatgattttggttatttcttttgccatggttttgctttgttagcggaaaaaataaacgggaagggggctgatggggggagacgcaaagaagattcaggctttttccacctgccagtattccaagtccacaggcgtggcacggccaaaaatggagacgctgacacgcagcttgcccttttccgggtcgatttcttcgatggtgccttcctggctctggaacgggccttcgcacacgcgcacagggtcgccgacggcgaattccaccttgggacgggcggcgacggcttccgcatccaacaggggcagaaggtcttccacctcgcgcttgcgcatggggaggggggagttgcgggagccggcaatgctgatgacaccgtcaatttgctggataaagtaccaaaggtccttgttcagggtgccgtccgcttccagcaggtacatgttggcataaacatacccgggaaagagtttgctgtgacgttccgtttttttgccgttgcgcacttcggaaataagttccgtggggacttccacccggtaaatgaagtcggaaagctcggcgtctttcgccttgcggatgatgcggtcacgaacgctgttttcctgtccggagaggacgtgaaggacataccattgttcgtgaggctctggggtactgggcatgatcggagaaagaagtggggagagtaaaactagattgccaactggatgagatagttgaccacgctgtgaagaaagatgtcgaacgatgcaacaaacgcgccaaggaataccatggcaatcagtacgacgagagtggaaccccagagttcgcggaattttttgaaacctttcaccttggggtcgctttcccagggccaggtcgtcttcttaagttcgcccttaacttcggcgatgaattgagaaatcttgcgaaacatgcttcaaggtggggtggtgtatttggaaagaagtggcaggtcaggagggactcgaacccccaacttttggttttggagaccaacgctctaccaattgaactactgacctgttggagtctcttctttcgtgggaaatgagggggcctgcggggaggccccctcattaaacctgatgtagattcctctacaagttcctgaggaacttagtcaaggatttcgctgatacgaccagcacccacggtgcggccgccttcgcggatagcgaatcgcatggctttttccatggcgatcggagtgatgagctggacttccaggttgacgttgtcgccgggcatcaccatttccacgccttcgggaagggtgcagcaaccggtcacgtccgttgtacggaagtagaactgcgggcggtagttgttgaagaacggagtgtgacggccgccttcttccttggtcaggacgtaaacttcagccttgaagttcttgtggggcttcacagtgccgggcttgatgattacctggccgcgttcgatgtcttccttcttcaggccgcggagaagcagaccaacgttgtcgccggcctggccttcgtcaagcagcttacggaacatttcgatgtccgtaacggcggttttctgggtgtccttgatgccgatgatttccacttcttccatcttcttgatgacgccgcgttcgatacggccggtagccacggtgccgcggccggagatggagaatacgtcttccacaggcatgaggaagggctggtccacagggcgttcgggctgcgggatgtaggagtcaacggcggccataagttccatgatggaatcttcggcagcggcatcgccttccagagccttaacggcggaacccttgataatgggggtgtcgtcgcccgggaattcgtattcgttgagaagttcgcggatttccatttccacgagttcaagaaggtcgggatcgtcaaccaggtcgcacttgttcatgtaaacgacaatggcgggaacgcccacctggcgggcaaggaggatgtgttcgcgggtctgcggcatcgggccgtcggaagcggcaaccacaaggatggcgccgtccatctgggcagcgccggtgatcatgtttttcacatagtcggcgtgtccggggcagtcaacgtgggcatagtggcggttttccgtttcgtattcaacgtgggccgtggagatggtgatgccgcgttcgcgttcttcgggggcggcgtcaatctgatcatagccgcgtgcttcggcgaaacccttcttagcgagcactgaagtaatggcggcggtaagggaggttttgccgtggtcaacgtgaccgatggtgcccacgttcacgtggggcttgttgcgctggaattgctctttagccataatattatgtttaggtttgggctgctatgggtctagcttgaagatggagcttctggcgggaattgaacccgcgacctcatccttaccaaggatgcgctctacccctgagctacagaagcatagacttcttccgcctttcgctgctcctagagaagtcgtaaatccgcccaaacctgcggttctagcggataaatagcatcctcccgtgttgcctgacgaaaagcggacgctatgttacgtttttagatgcgggatgtcaatgaaaacatgaacattttttcagctttatgccgcaaatacagggagtccatgtataatatatttatcaggaatgtgttgaatgtttggatctgtttaaatcctccgtcaatttaagattggggtcaacgtcttcatccagagagtggaacagtcctctgcgggctttgagacaggtgacataagcgatcatggcggcattatccgtcgtcaggtcgaagtccgggagaaccagttccactttttcacggtcacaggcggttttcaggcgggaacgcagctccctgttgcaggagacgcccccggagatggaaagggtgcggtgaccggaggcgcgcaaggctttcagcgccttgtgaatcaggacgtccgtcacggcccgctggaaagaagcgcagaggtcgcgcagagtttgccggggcaggccgtgaggatcgccgtttttcgtaattttgggcagtgtatagagaacggccgttttcaggccggagaaagatacgttggctgtatgctctttcatcagggcacgggggaaagaaaaggcttccgggtcgccttccgccgccaagcggtcgatttccggccctccgggatagggaaggcctagcattttgcctaccttgtcaaaggcttcccctgctgcgtcgtccagagagcggcccagcaggcggtagttccctacgccgcgcacatccacaaaaagggtgtggcctccggaaacgaccatgcccagatggggaacgggaccgccggggcgtttgaggaagggggaaagcagatggccttccagatgattgacggagacgaagggcctgcccgccgccagagccagagccttggccgtgctgttgcctaccagaagcgcagctaccaggccggggcctcccgtagcgccgaagacgtcaatgtccgcaggagctgttccggcttcgcggcacgcggtccggatgattccgggaagatccgctgaatggttgcgggaagccagttccggcactacgccgccgtgctggcggtgaatggcaatttgggaggagatgacggaggagagtatttccggagctttttcctctccggcagaacgcaggatggcgactgccgtttcatcacaggaggattctattcccagaacggtaagggattccggcatggaggaagaacagggaggggaggttaggatgcctggtggatttgggccggcttgttgccggtaaccgtttccctggtaatggtaacggtgtccgcatttttcatgctgggcactgtgtacatgacgtccagcatgagggtttcaaagatggaacgcagagcgcgggctcccgtgccgcgtttcatggcttcggcggccatggctttcagggcgtccggcagcacgtccagtttggcgccgtacatggcgagcagtttggaatattgcttgaccagggcatttttgggttccgtaagaaggcggacgagctggctttcatccagcttggagagcggacagaagatgggcaggcgtcccacgaattccggaatcatgccgaaggagaagaggtcttccggcatggcctgtgccagtatttcctcttccgagtattccttgcggtcacgttgttccgtgatggctccgaatcccatctgggtggcgccgaggcgtttgcggatgatgtcttccagcccgacgaaagcgccgcccacaatgaagaggattttttccgtattgacgcggatgtattcctgttgcgggtgcttgcggcctccggtgggaggaacattgcagatggtgccttcaatgattttcagcagagcctgctgcacgccttccccggagacgtccctcgtgacggagacattctgtgttttgcgtccgattttgtcgatttcatctacgtagatgatgccttgttccgctttcgctacgtcaaagttggcagcctggagcaggcgcaggatgatgttttccacatcttcccctacgtaaccggcttccgtcagcgtggtggcgtccacaatgcagaatgggacgttgagcattttcgccagcgttttcgccagcagggtttttcctgagccggtggggccggccagcagaatgttggatttttcaatttccacatcgtccagggacttgtcgtccagcatgacagcactttggcgcaggcgcatgtagtggttgtacacggctacggaaagcacttttttggcgtagtcctgaccgatgacatactggttgagcgtagcgcacatttcttccggtgtgggcagcgggccttcataggaggccggtccggccgccgtttccctgagcatgtccgcggctgccgctttgcgggcctccgcctggcacatggcgtaggcggagggttccatgttcaggatgccgcggatgaagcgggtcgccatcggaaggcctgtgtccttcacaatcatgttgacgcaaatttcaacgcaattgttgcagatgtaaaagtcttccgcaatctggatgagtttgtccaccttgttcccgggcttgccgcagcaggaacaggcaggaagatgaggggtggaaccggacatggtttttcaggtagagagagaaatggcggagggaaagggtcaggccttggtttttttcttgtcgccctggtcatcagagtgatgcgccagaactttatccaccaggccgtaggccacggcttcctcggcagtcatgtagttgtcgcggtcagcatccttttcaatttgcttttccgttttaccggtatgtttggccagaatgccgttgaggcgttttttgaggttgaacatgaagccgatggtgcgttccacatctgaagcggttccctgggcacctccggaaacctggtgaatcattacgtgggagttcggcaggcagaagcgtttgccgggagttcccgcagccagaaggacggaacccatggaggccgctatgcccaggcaatatgtatttacgtcacaagagacgaattgcatcgtatcgtaaatcgcgagacccgccgtgacggatcctccgggggagttgatgtagacgtggatgtcttttttcgggtcagccatctgaaggaacagaagctgggcaatgacggaattcgccacatcgtcgtcaatagcggagccgatgaagataacgcggtctttcaggagacgggagtaaatgtcaaaggcacgttcgccgcggccgtcctgctccactaccatgggcacatagtaggagtttgcgggggttgatttggaagattggtcttgaaacatgtttatggaagattggatgttgttttttcaatgtacgttacccgtccaaaagatgcaaaacgggggagtcgggcatgtgtgcgccaactccccctggtaaggtgttttgtgcagaggaggggttactgctcgtctaccgttactttggcctcttttgtcaggaagtccagaaccttggctgtcagcaggctcattctgatgccatgcacgcggccttcgcgctggagttcgcgaatgtaggatttgaggttctttttctgctggcgggcctggcgggccacttcgttgtaaagctccatttccgtgacggcaattttttccacctgcgccacttcctgaagcatgaagaagaccttaaggttgcgcttggcctcctgtttggcttcttcccgggcttcctccacaaacttatccatgtccgccggggcgtttccgctgtacatggcctgctgcattttctgctggaggatgccgtacacttcacgttctacgacagcttccggaaggttgaagtcaagcatgtccgccagcttttccgtgatctgatcggccttggcctcatcaatttgcatggctttgcgctgggccaggttttccttcagggcggttttcaattcttccaggtttttgccgggaagaactttttccgcaaaagcatcatccatggccggaagctgtttttcccgtacttctttcacagtggcatggaatacgagttccttgccgcgcagttccgtaattgggaaggtatccggaatggtgacggtgatatccttgctgtcaccggcattcaggccttccagggcggaggcgaagccgggcaggaattgatcgtcttccaccttcatccactggccgtcacggccttccaggaagcctacgggtttgcctacggcttccgctacgggcttgccgtccaacgtggttttgaagtcgataatcgccacgtcgtctttttgggcggcgcggtccacaggggtgaattccgcgatttgttcagccagggagttcagagcttcctctacgtctgcttccgttacttcggaagagggaaccttgacttcgatgcctttgtattccggtaattcaaattcgggaactacggtcatcgtgctggtagcggtgtagttgccctggtcatccagagattgttccggctttccgaagttgagcactttcaatttggggttttcttccagagcggtggagcaggccgtttcaaaaagggtgtccagcagttcttcttcaatttctttcttgaagcgcttttcaatgatggacttgggtgttttgccggggcggaagccgggaagcttggctttggcggcataggaatctacaatggaggcgcggcgcgcagccgtggtttctgcagggatggaagctttcagcgtggctgtgcagtccggttgaatatcaacgttgatttccataaataatacggtcagtgttaattgaaagtggttctgtttcagctccgggatggcggcagcggtcaaaacacgagcggcgataactttaatgagagggtatctggagtgcaagctattgcacaggaatgacacaattgccctcctaagcgcgcacgcgcacgcgatgtaatagaatacggggcaactgtgttctacgcggaatcacgtcttgactatgcaagaggaaaagtcctttatatcccaagcattaagttcagcgctcatgattcgtcccgtttttttgtgtgtttcctttcccttgatagcatgttcggctgttttggcccaggatgaaacttcccttaacagaggcgcctatggttccgtgatgactccggaacaggtaatgcgggaactggggccgggcacggggcttcttcccggtgaccaggcgtatgaggggcggcctgtgaagagcgtttccgtgcggtacagaagcaccggcaagaccgtgtccgaagaccgtctgaaaaatttgctggctacgcagccgggcaccagttattccccggaagtggtcaacaaggacttggaacggttgttggaaagcggtctggtaggcggcaatacaacagtagccgtggagccttccggcgacggcgtggcggtggtgtttgaaatggcggcccagaatctgctgggcggcgtggggttccgcggcaataccgcgttcgacaacagggacctctccgaggaatgcgggctgaaggggggggaagctctcagcgacaaggccctgagcagcgctattgccaagttgcgcacttattaccaggaagctcggtatccggatgtacgtgtttcctatttttaccagaaaacggaacggcccggctttgtggatgtggtcttcgacattaacgaaggaaaaaaggccaatattatcaagattgactttgtgggcaatgaacacatcagcgccaaggatctccgacaggtgatgaaaaccaaggagaagggctggttgacctggattaccaaatccggacgcattgaccgtgaacaagtggaggacgatctggcggaattggtgacttattaccgtaataaaggttatctgcgcgtcaagctggacaaggtggaatattttgacgccggcaaaggcaatgagcagaagctgacgatgagaattacccttaccgaggggcgccgctacaaggtcaaccaggttgccttcggccccaccaaggtgtttacggcccaggaactgattcccggcctgagcatgtacaacggggatacctattccgcccagaaagtggccgacgacgtgacgatgatccgccgttattacggttcccgggggtatgcggacgcctccgtgcgtccggacattcaggaagtgggcgttgatcccaagacaggttacggacaaatcaacatcgtgtaccatgtgacggaaggcaatccctaccgcgtaggcaatatccgcctgaccgggaataaccgcacgaaggattacgtcatccgccaggaacttcccctccagtccaatgaccccatgaacgccgtggatttggataccgcccagaagcgcctccagaacctgaactattttgacatggtggacgtagcccaggtgggatccacgcggcccggctaccgtgatatcaatatcgaggtggcggaaaaacgtacggggtccctgaatatcggcgtggcattttcctctattgaaagcgtttacctgttcgcaggcatcacccagtccaattttgacatgtatgactggtcctctttcgtgggcggcggccagcgtttcgcgattaacgcccgtgtcggttttgaaacgcaggatgccagtatttcctgggtggatccgtggttcctgcaccgcaagctggccttcgggacggaaatcttctacagcaattccacatatttttccgattattacgaccagcagaactatggctttgccatttctctccgcaagccgatcggggaactggattacgtgaaactggaataccgcctggaacagtaccgtattgacgccgaagggaacgcccctatcttcttctggcaacaggacggagactacctgcgcagccatgtggaactttcctacaccattgatacccgcgacgcgcagatttttccccgcaagggaggcaaatttgaagtgctggccggttattccggcctgggcggcgatgtgcatacatacaatttcggcgtgaatggctcctattactggaatttgcgcggagacaccattttcagcatcaatgccggtgcggctaccgtggattcctatggcaaccacgatgtgcccatttttgagcgcctctacctcggcgggccatacaacatgcgcggtttccgtttccgggacgtggcgccgtacaatcccgccctgagcggtgatgagacgatgggcggccgttcctccttcttctgccagtttgaatattccattcctgtgattgaagaagtgcgcgtcgcggtgttttatgacatcggttttgtcaacggagattcttttgacttcagcacgtccaaaatagtttccgactacgggatcggcctgcgcctgaacctgcccatcggtccgctggcagtggactatgccattccgattcagaagaacaacgccattgaccgcggaggacaattccagttctatctcaattattcctattaattacgtttgataatttctctaccgtttgacgacatgagtaatttccgcattcttatcctggcgtttctggtggtggtgctggctgttctgggaatgatttatgtgaatatttcttcaagaatggatgtgattcagcaacagcagcagatggcctccactccggcacctgtcaatccctccccgtatcttccgatgcccacgcaggctcctgcttccgccgttcagccggtggtggtggcggatcctgtagtgagcgaggaactggctcatgtttcggcggagctggaacggatgaagaaggagaatgaagaactgaagaagcgccatgccctagcggaggaagaacgcgatctgttggaacgccagaatatggaaaagggagatccccggctgcaatggcttaatgaaatcaaggatgcggagcaggtgggccgtgtgacggaatactaccgtgacgccaacctggtcctgttccagtccatcggccagcctgacttgaaagtggggcaggaactgggaatccgcagacgcgggagcatttttgtatccctgattatcgacggagttgacccggacgggaaggtgttccagtcttacgtgaagcgtaatacgctttttgataataatgacaaggaacccatcaagccgggggatgaagtcattgttccgcctgcgagctggcaggaaaacatgacggaagaagacaagtccggtatggcttctccctccacccccgtccccgtggaagctcccaaaccggtgatgattcccatggagccgtgatgcggatccgtatttagccaagccaagtaaagagaagtgcacctgagagaaagattgcaatcgggcgccggtcccagcctgtcctttgaatttttcccgcccaaaaacgagcaggcagcatcggccttgtaccagactatccgtgaactggagccttaccgccccagtttcgtcagcgtgacgtatggtgcagggggctccacccgcgagcttacccgcgaagtggtgttgcgcatccagcatgaatcccgtattcctacggtgccccaccttacttgcgtagggcatagccgggaggaggtatggaatatcctggaccaatacgcccgggctggagtgcgggccgttcttgcacttcggggagatcctccccggggagcgaaggattacaaccgcgatgcggatgtttttcgccatgcggcggatctggtgacgtttatccgtgaatataatgaatccggccgtcacccggatccggatggattcgccataggcgtggccggcttcccggaaggtcatccggccactcccaaccgtctgcgcgagatggatttcctgaaagccaaggtggatgccggcgcggattatatctgcacccagctgttttttgacaatcattcttttttggattaccgggaacgctgtctgctggccggcatcaaggtgcctatcctggcgggaatcatgcctgtgaccagcctgtccggcatgaaccgcatggcagagctttccggaggcacctgttttccggccaggctgcttaaggcgctgaagcgtgcgggttccaatccggacgctattcaggaggtaggcatccaatacgcctccagccagtgcgccgaactgttggattccgatgtggacggcattcatttttatacgcttaaccagagccgggcaacgcgggaaatttacaggaatctgggactgaaggattccctgcagcttttggaacatggcgaagataagtaaaaagctgattgatttggttgggacaacacggtagaaccctcttcaacatattatggatatcaaggatattaaacgggccatggacaatatgccgatgggcgacggaagtgcgtttgcggaaatttccgtcggcccggccaagcatgaacagtttttggatgaacattacggcaaggttgcgctggttgtgttgctatgcgtccttggggctgccggatggattatttataatggcgtgcaggattccatggaaagaaaggcaggcgccgctctggtggccgctatgccggaatccccggcaaccggggaaatttccctggacgaacaggggcttcagcaggtagtggctgactttgacagttcccgcgccgccgtcaccgcctcttaccttcaggccattgccttgtggaacgccggcaaggaggatgaaggcgtggccaaaatgaaagcttttattgattccgctcccacggaggaatggaaagcccaggcttccgttaccctggcctgccgtctgatgaaccgggggaaagcggatgaggcggaagggttgttccgttccgtggtggatgcgggagatcctactttttccggttttgccaccatgtgcctgggggacattgcccgggctaagaaagacaatgccgccgcaggcgccttttaccgtgaactggcggagaaatttccgtccagtgcatttgccttgcagagcggaggctacctgctgcgcaagagcctgtttgatattcagagtcccgttcgtattgagcccgcagtagaacagaaataatccatgcgggcgtttccgaagttttccggaagatgaacgctttttccatccgcatgtctgtttttttacagtgcatgcggatttccgtattcaggaacgccggaacaggggggtaatgaaaagcctgctgcgcgcgtagctgttatgattccgggaattccgttcaggactgtgacatatttaaacaaatcatcaagggattccgcgcttaccggatgtaaccgggctgccggtgttaatccttattttttatctcatgaacaggcatattaaatcattctggcttcttcccctggcgggaatgacgctttctttcatgccgtcctgcacgacggacagctacgggaacagttccgtaacgcccggcggagccgccgccatcggtgtgggggcgctggctgccggcgccgctattggggcggctgtccagcatgaccgcgacaaggacaggtaccgcaatgactggcgtcaccataatcctcctcctccgcctccccgtccgcctcatcgaccccaatggcggaggtaagaagggagcgtgcgtgtaagggcggcgatattttggttcggcagggggccgggaggcgacgcgtttttccggtctgcccctttgctgaaatctcagacccgccgtatgccgcggagcgcccaggtcatgcgttgtctggcgctttccggatcattgaggatagaacccagcaagtcgagaacgggccgagctgctttggggtcgtgcacttggagctgtccggaaaggataaagggggctcccccgcagcagacaaggtaaatgaggatgttcatggggtctcccatgagcacggatccttcctgctgggcttcccgtatggtttccagcagcacaaggggatggcgcgtatggattcctgaaatgaaacggatggccgcctgttcccctgccagggcgtccagaaccagctgggcaatgaattggccgtgacgcagcaggaactccatgacgtctcccaggatggcttccagtttttcaaaggccggaagatgaatgttggcatgggtcctgatgccggtgaacagaggttcgtaccagcgttccagaagctcggtcagaaaagcttcccggttgccgaagtgatagacaaagctccctgtattggtgccggcccgcagggacaggccgcgaacggtaagggcgcgcagcccggattccccgacaatcatggcacccgtattgagcaggtgctctctggtggatttccgtttgggcatgaaggtgaagcttgaacctccatgtgtgccccttatcggcctgcaaggcaaggactcgttatgtctgttgctgtaaaaagcggaaccggggctcatcctctccccggttccgccgccggagtcctgaatgaatcaggaggttgctttcaattccttccgccgggaggcaatccagcgggagaagagtttggccgtggccggaatgataagcaggttcaggatggtggctgtcaccagcccgccgaactggacgatggccagggggccgagcagttcgcctccgggctggtcaatggcccagatcagcgggagcagccccagcacggtagtcagggaagtcatgatgatggggaccacgcgttccagagaaccctcccgtatggcttccgcgggttccatcccctgatgttccagggcccggtacctgttgagcagaatcaggccgctgcggatggcgaagccgatgacggtcacgaatcccacaatggaagccacggaaagaatgggaggaatgtaagttcctccaaacagggaggacagcgtaccgggggaggcaaggaagacggctacgatgccgcccaccaggcacagcggtatgttcaccagggtcagcatggcgcgccggacgcttcccagtgcggaggaaaggagcagcacgatgagcaccatgacgatggcgcccaggacgtaaagccgttgtgatgcggattcccgtgctttgatagtgccgtcatagtccacggtacagcccatggcgttcattaccgggtccaattgttcccgacaggctttcgcaaggtctcccaggttggaattgggggagggattgcaggaaatcatggctttccgcatggtgttgtccctcaggatgaggttggaaacttcctcccggtatacctgtgccacgtcgtccaggcgcacggtttttttattgggggaaatgagttccaggtttttgacatcttccatggacgttttaagtctggggtcaatgcgcaggacaatgttccaatggtcctggtttttgatgacttctcccagtttttgtccgttcatggccgtggaaacctgttccgcagcattcgccatggtcaggccgtaggaagccagggcttcctgattgtattgcacgcgaatggtatccaccataatttcccggttggcgcgtgcatccgccacttccggcatgttctccagaatttccttggctttccgggccgccaggcggagctggggcagctctgtgccgtaaatgttgatggcgatttccgagttggagccggacagagcggaactgatgcgatgggccagcggatagccgatcatggagctggtgccggggatgccgtcaatgcatttcttgatggcggcgcgcaattctttctggtctttcttcagatccacgcgcacgagcagctcggaggcgctgacgggttctgcgtgttcgtcgttttccgcgcgtcccgtgcgctgggtgacactgagaacccccggaatctgttcaatatctttcatcactttccgggagatgcgctccgtttcatccagggaagttcccggcaccgtgctgacgaagactgtgtagcaatcctcgttgaacggcggcaggaaactggttccgaacgtggaacccagccacagggccagcagcgtaatggccgtcatgatggcgcagaccgttttggaaaagcgcaggcagaattccaggatgggggcataaatgcgtttaatgaggcgggagctgaaggaatccccgctttccagagtagcggcgtttttgcttttcttgaaccatatgtaacagagaaccggagtaatggtgacagctacaataagagaagaaagcagggccagcatgtaggagatccccaggggccggaaaaactggccttccagaccggagaggaagagcaccggagtgaataccagcaggatgatgacggaggagaaggaaatggagcctacgatttcgctcttggctttcatcagaacctcatacttgctcttgcgcttatctttcggcagggcggcgttcctgttcaggtgcctccaggctatttccacgaagataatggcgttgtccaccacgtctcccacggctacggcaaggccgcccagggtcatgatgttgatggccagcccgaaggcggggaacatcatcatcccgaacaggatggacaggggcatggaaatcagcgtgatgatggccgtgcgaaggttcagcagcgtcaggaagatgacgatcatgaccaccgctccggcaatgaggagggtttccgtgccgttatccagggacatttcaataaaatccgcctgccgataggctgcggtgtgcagtttcattcccttgggaagctggctttgactgaattccctgacggctgcatccacggcctgtgtcagggccagagtattggctcccggcaccttctgcacggaaagcactacggcgtcttcccccataaatccggcatctccccgccgcggcgcaccgtctatcttgacttccgtcacatcctggagccggagtattccggaggcatggtccggaaccagggcgcggttgagctgttcaatattggcggtgcgggtatcctgctggatggggagttcctgcccggctacatcctccagataccctgcggggacggaagattgggattcctgaatagccgttttcaggctggaaaggtccaccccggccagtttgagtttgttgggatcataaatcacctggtattccggcagacgcccgcccagcaccgtgacctgccccaccccgggaatggccagcaggcgcgtgcgcagcttgtattccgccagttgcctcatgtccagctgggaggtatccttgtctccagtcagggcgatgagcatgatttcccccgttatggagacgatgggggccagctccggggatgtcccttccggcagggattcccggactgctccaagacgttccgttacaatctgccgggcctggtagatatctttgttccagtcgaaatccacccatacgaaggaaagcccgctgccggaggaggagcggacgcctttgactccggcggttccgttcatggcggactcaatgggaatggtgatgtattgttccacttcttccgcagtaaggccgggggcttccgtctggatggtgacacgcgggaccttcagttccgggaatacgtccacgggaatgttcttcaccacgaaaatgctgatgatggccagcgcaatcgtcagcaggatcacagtgatcctgttgttcaggcagaatgaaatgagaaagttcatggattctgattgctgaatacctaagattcaaaggtttattccaaggaaatccgggatatttgttccttaatcttttattttgtacatcgtttagtgttctccttcgtggaactggccgtccgcgtggaagtgcccggctgcttttttgcttccggcctctccggtgggcaggatgtatttcaattcatacccgcccttggtgacgatggtctgtcccggcatcaaccccttgacgggcgtttttccctgccgggaaggcagtgtttccacctttttcatgacaaatgtgtcgtttcccgccttgatgaaaaccacgtcgttcacccctaccttaacgacggcactattggggacgggaatgaagccctccgcagcggcgtcatgggagtacaggtccagccgggccagctggccggcatgcgtcccttccggtatgcggtccggggtaaaatacagggcccgggactgggtggcgggatctacctgttcggccaccctcagggagccgttcagcagttccgtgtttttaccgctggtcagggccagccgggcttttgcataatggacgggatccgtcccataaatggtcgtggtaaattccagatcccctttattggtcatgacgagggcaggcgcgccctgttctccccaggcgccctgggtcatgttcacggactgaacggaaccatccgccgctgcgtatatgtaaagaaggttatttttcaatacgccggactccatcaccagtttcaatttattgttgctggcgttcagggcagcccggaggctgtggatttccgcctctttgaattggatggaagtattcagttcgctgttgcgggtaccgattttttccaactgggcccggcgttccctgagggttccgagttctgctgcggcgcggtccagcgcggccctggcctgggaagcgtttccttccatttccacaatatccggggatgccagtgtatacagcagttctcctttgcgcacttgttgtgcggatttgacgttgaatgtcacgcgccctgcggcgggaagggcgtatgtggttaccgcatggggaggaatgaccatctgcccgtgaagggttttcgccgctccgtgggatgtttcctccactttctcaaagcgcatgtccagagaatggcgcgctttttcatccacatgcacgggaatcatgtctcccggttggccggaatttttttccgcagactcctcgcgttcatggttgcccgtgcaggcttccccttccgcgtgctggtgaccttccagttcatggtcgcctgtgcagacggccccgtccgcatgcctgtgttcttcatgggcgtggccctgagtacaggtttccccagccttgtgctgatggtcgtcatggccgtggtccgccgtgcaggcggaaccgtcctcatgtttgtgttccgcaggggcaggctgttctccgcgtgcggaatggagacagaaagcaggagccagtcccagcatgatggaaaaataaagatgtttcatattcattaaagatggtggaagattgatgtggattaaaggttggcgtgggtgaggtagcggagctgggcctgaacggccagaagcttgtccagattgtccaggaaagccaggcggctttcgtaaagctggtggcggttttccgccagttccagcagggatgcttccccaatgccgtgcagcttttccatggtccggacggaggcggcgaaggattccatgcgctggagttccgtgcggcagtggcggagtgccatctgctggctggcgtcaagctggcgggcgttgaataattccgttttccaaagctggatggtttcctgtctggacaagtcccgtgtgcctcgggcttccgcaatggccttgcgattgcggttccaaaggggaagattgaaccctatttctccgcctacttccttttctccttcgtcgcgggtgaaggaggggccgagctccagttccgggtactgccggcggatttccgttttgaataatgtctccgtggtggcgtaggtcgccagttgtgccttgatttttggagaggcggtcaaggctgaagggccgggagccggtacggcggcgggaagctggaaattctgtttcgtcaggaaaccgagtttccgtaccgcagaaggatgcaggcccatcagcttgacgagttccattttttgctccaattccgtttccgtcacggtttggagttcccggatagcgtcattcatccgctgggaggctacctgccgagaggaaaaatccacttcccccgcgccgataagctgttcaatcatgccgttttcccgccggatggcattcagccgttcccggatgaccgtcttgcggcgctgggtaacggccagtttgctccatgcctggtccagggaactgagaaaatccagttcagcctggcggagggtccagaagtcggcctccttgtattgttccgccacctttttttccagggcggggaggccggttacgggaatggtgaagcccaggctgccggacatgttgaccgtattttcctggaggacttgttcaatatcccaggaaaaggagggatcgttccaccagcccgattgcctggctacttcattgctggaagccagtttcagccgggctttgttcagatccggattcatgaccaggccgatctggcgagcctggttctgagtgattgaggtaggggaatctacgctggacgcctctttccaggaggcttcctccgcgttcaggtcgataggcgcgctgtggtagacgctgcatgagctgagcagggctgccaggcctattccggcgaagaatggtgtggatttcatgatggaaaagataataaaaacagttcggtccaatcaggtttggacaatgcggcgaataattccgcggaaacaaataaaagcggccgccgtattaaagacagcgtaccgcaggaaacgcccttaaggacgtttctaaaaagagccgttaaatcagcaggggaagttgaaagccttcatgcgtcgggccggtattcctgaaggggtcagggggaaccggtgttgcggaatccgatgtttggcttattaaaagaagaggccgggccagatggtggaaatccggcaatgtttgccagatgacgtaaggctggggcagaggtgcatgaggaacgggaaccgtcagatcattaatctccagctgccggtgttcgcagaggtgcccggccagagggctggaagagccggtgcggggcacatcgtccccgtggcattcgcagggggcggcatcctgatggcaggaacaggaaaaaatgaaaatttcttcatgacacgggcacacggaaaccatacccgttccgcctacgacgaccagcagaagggtgagcagcatgatgccggtgcgcaatgctctaaccatggtatgccgcgaatcctagaaaggagccgtgaaagcgtcaagagcaaaagtggcggatgtctgaaccctgaaggaaaggccgttatttttccgccgctttgcggagcaggtccacggtgtgttcaaaagccacgccgcggacatcaatgatccgggagttttccgcgattgctccggtgatttcctcccggaattttccggactgttcttccgtgagcaggtttttggaactcagggagcgcgtgatgagctggaggacgtaccctgtttccacgaaagactggcgtcccacggcttttttcatggcttccatgaattccggggcgtgttcgggcggcaggccggccacggccttttcataagcgcggatgaaggaatccaccggggctttggaaacttccgtcttagtgaggtcaaagctggattgataagcgagagctccttcttccgccagttgaagggcgtttttcccgaatttgttgacggcagtcatatccgctcctttttccagcagcagggccgccacctggaaattaccgcgcatggctgccagcatgaggggcgtaaagccgttgccctcccggttgttgatgtctgctttcctttcaatcagcatgtcggacaggcggtccagcccgctccaggaagcccagtgcagcgcggtccacccgtccttgtcctttcggtcgatttccacgcgggggtcttccagaagccggtccagatagggggcccgagtggcttccagcttcagcgtggtctcaatgttgttgtagttggcgtagcatacccacatgacaggagttctgccatggggatccgtcatgttgacaaaagcctttccttctgccgcagccagttcttccccttccttcagggtttgttcgaattccttcatccccttgactcgggcttccttctcctcctgttcggaggaagcgttgacttctttggcctccgctttcttcattacggtgataaggtccagggccgggttgggatctccggagaaagatttggagaccaacaggctgagaccgccgaggagggagctgaaagctaccaggatgagggaatccacaatgatgttgcgcgtgtgctggttcatggtctcgtaagttcaggagttggcttccgtaaattcttccgccgtcagggcgggatccgtttccgcttcaatggcgctgatgggtggcgatgccgcgtcttcctcgggatggtccgaggtgatggtcctgcgggtcatgataatggcgatggggctgattacggccatggccaggtaaatggtccacatgaattccggggagtcccagaagccgatgtgcccggtatccatcttggcgcagatgccgtcatagcagaggtaggcgacgagcaggccgccgatgatgccattgataggtttggcgatgaacatgggaagcgccgccagagacatgtaggaggccactttgtctttcggagctacccgcgccacatattcggagaagcggggggagaagagcagttccccgaatgcgaataccaggatctgcgccacaatggctaccagatacgcctgagagcgcgtttcaatgccgggcaccaggtagtaccattcaatgggaatggccatgaaaacgagagagaaagcggagatggacatgcccgcaatcatgaggccaacggtagagaagcggcccagcaccggaatgagcaggatgaggccggagacgatgatggccgggttgacggcattgatggagcctatggcaaagtcgtcatatagcgtacgcacgtagtatttgggcatcaccaggaattgcagcgtgaaaacgatgcgcacgcccatggtcagcacaaggaagaggataagtttgcggaaggcggattccttccacacctccatgaagagctggagaggtctgcggaggggggcattgatgttcgcctcccgttcgctgggttccgagtagttgtcttcattaataaaacgggtggtgatgcagcccagcagcaccatcagcgttccgaagttgataatccagtatccgccgtccacggcgccgaagtgcttgcggaaaaattcaatcaggaacacgttcgcgatgacggcggaaatgttcatcagcaggtagtagatattgaagcccgtggaacgcgctttcagcggagtgaagcgccggatggaagtctggatgacgggggacatgaacgccgtgccgaaggacataatcagaatgcccgtcatgacggccagccttccggagtccacggttgggctgaggtccggaccgaagcccatgataaggcgcccggcaatgaggatgatgaagccgattaggtaagtgcgccgtatgccgatgatgtcgcagatggaacccaccgcgaagacgaaggcggagatgaaaagggtgtacaggcctacccagagggcggcgtccgcatcgttgaagctgcaatagtccgtcaggtagagaacgaataccgtaatcatggaaaaataggccattccgtcgaagaactggacgacgttggtaagccagaaatccttggatacggttttcaggatcttgaattccgaaaaatatttgaggatggggtttgcggactcattcatggagagatggaaacggtaaggaaaagttgacgacgatgaaagagtgggttacacgcatccccgtttcaagatttttttgggacctacatacttgactaaccatcatatttcccaaaaaaattataaatattctatatggaagaacaagaagaccctacacaaaatataacaaaagaagaatatgatgaactttgtgccatgaaatcaccgcatcatattccacaatggaaacgtatattggtgtattacattcacaaaattctcaatgtaaattatacgccaataacaccatctcgtctaaatgcgaaaggacattattggcatataaaaaatgggcaatgtataaaattatgatttaaggaaatcagttaatttcgttttataaactgtattatccttaatcctgtcaacttttgtgagtgatccattatcatattgaaataatagtatttcatctgaatttaataatcgacaatttttaataatatcattacccaaatctactacattttttgtgctttgaaaataaacaagtgatgtagtagattcttctacaaatgaattttgttttctaaaatatgacattaacaattcatatcgttcgttatatgaaagctccccaaaagcagaggtgtcgcctagtctgaatgatgctacatattttgacatatttttattttttgtttctatggtttgtatgtttgagtctaaagagatcatcgcaatatctaccaccatctccttcaactccctacaacatcttatgcaaatggcatgccaaaaaatatctatccattaatatttgttaaaaacaattaattatcaataataataacaaatatctaacaatttatctaatgagataccatattatcattgagacattttgacacatttttatgggacaatttgtctcatatagacattctgtcgcactgtttaacctccgttaatttttatatcattaaattctgagaacaattttctactcgcccaatatgggtaagaaaattgtaatacaaaatacttctcaatacgctgaaaataaacgcgtacgaactaatcaaaacacgacaaaatttccctatcacaacaacgatatgggaaacaacaaaaccaaatatacttccttatatgagttcttctccaaatttcctaatgaggaatccgcccggaagtattttgagttaaaaagatggaatggtcatgtccgttgtcctcattgcggttcagatcatatcaccaaatgtaaaaaccactttccgatgccttatcgctgtaaagattgtagaaagttcttcagcgtcagattcggtacaattttagaggaatccaaattgcctcttcacaaatggttgatgtgcatgtatctgttggcgacttccagaaaaggcatttcctccatccagatttcaaaagaacttggaatcactcaaaagtccgcctggttcctctgtcacagaatcagggaagtttggatgaaagataaaaaggagaagttggacggtatagtggaagtggatgaaaccttcatcggaggaaaggaatccaacaaacacttttccaagaaattgaacaggggaagaggttcagtaggtaaattgattgtgatcggggccaaacagaggaatggaaaggtgatcgtcaaacatatcgacgatacttccgcttacaatttacaaggattcatcggaagacatgtagagaggaattccaatgtgtttacggatgagttcaaatcctataaaggacttgtcggatttgtccatgagtttgtcaaccataaggggaaacagtatgtcaatggagaggttcatactaattccattgaaagcttctggtctctattgaagagaggatattatggcgtttaccattacatgagtaaaaaacatcttaagaggtatatccatgagttttcctataggcataatacctccaagattgaagtaatggaatgtataggagatacgattaccaaaatggttggtaagagaatgatgtattgtgaattggtgagttgaagaaattgaactctactttccttgatactattctttggaagacttctccatcacatcatctagaagactatgcacatctatctgtagatttttacaaatgttgatgacctccgtgaatgtaaggtaccgttctcctacttcatatttgttgacaaaggtatgaggagtattcaggagttctcccaagtcccgttgagtcatattcaactctaaacgtttttcttttaatattttacgaagatttttctcttcaatactatttctgttcctcattttggaacaataacagagaataagattgtaccaaatttaggtacaaaagtatttacaagtcattcgatattcggtaataggtcttcaatgttcctaaaatgggaacaaacctagataagaactatgaagacattatcatcagtaaaggccctattcatttccctaagcctattggtttcatacaccataccctattgtttggcggcaaaaactgccgatgtcacgattgatggagatattatagaagataacgaaaaacatcataacctctcaaatg

SEQ ID NO: 20 - DNA, 7786 bp, Akkermansia muciniphila
  source 1..7786: mol_type = genomic DNA
ttcatgcgctttattgatttcttcaggatcttcctataccggaactaatattgtaatttctacagtttgtggatctaattcttttggggatgcggcgatttactcaaaaggaggaaaatttcttaatttaggagcgaattatggttggtcctcagttaccgtatcaaagggaggcgtgtggggtagttacagttcagcgatcgaactgagtgacatgaccgaaacatctactatctacaatacgaaaatttataattacgcagatgagggaacaggtattcgcctctggaataattcaaaccttctccttgataatgtagaaatttataatgcctcagatacggcgatccacgcgagtagaaacgctacaatatcaaataaaggtaatggaattattagaatatcgacaacaggagacaatagggcttctatatccgcaagcggagattcaaaagtaactctttataacacacatattgaaaataaaaaatccagtactagtggggtcttggttggagatagtagtactatatctcttacaaattcatctatttcttcagttaataacaacacactgatttcaggtgcaggaaatctagaagttagtcttaataacgtggatttgtctaaatctaaaaatcagagaatatccgcttcatctgacttaactgttaatattcagaatggtacttctttcgatggttatacttctcaaaaaaatgatggttcaattaatataaatttaacaaaatcaagttggaacataactaaaaattctactttgttttctctatcactaaatgagaattcatttttaacatttaactgcgggaatggagataagttctactatatatccgctggttctgttttcatggataaaagtagtcaaataaggcttgatcttgatgagacgaaaattttgagtatgatctcttccggtgatgaattccaactattttcgggcgatttgacgaattatgatctttcagatattgatatgttcaactctgacggatcatataaattaacttatgaagaaggggaatcgggaaagggatggttcaaattaataggatatggcgttgttcccgaaccatcgacttctaccatgagtctattaggaattgtttgtattctcctaaagagacggagggtttgatagaaaaaaggaagatcgtaagttgatcttccttttttctatattgttcaccttcaaataattaggatataatgaaaatattataaaatagtttggttagtcaagtatgtaggtcccatttttttctcccaaaggccggtttgaccggaaaaatgcgcttcatcgccggggaaaccgctatctgggcagaatgcgtcggaagcctgccacgtggcaccatgacaacgctttcaggcattgttccacagccatggcgtccgaaggcagcacgggccacagcccggcttccttcagccctgatttggctatttccgccgctttccattcgcggaactgggagggaagggcggagaaagtgaaaaaggcccagcaggccagcccgatggccagcgcgatctggaatttcaacagtccggccgtcagcattcccagcaggataagagctgtgaaaaaaggaatcatcgtggcgcgcgcagaggcggttttgcgggcttttgccgcctccgggtcttcccggaccaggctgctcatggcccaggtatgggctacgcaggccagccggcctgcggtcaccttgccttcccatgacggaggaaggctgatgaatccgttttcatccactccgggaaaccgggctttctccagtttccgctggcgtttttccgcaccgtccaggcggtggattaatcccgccgggccggggaagccgggcagttcccgggattcgtaggtgcgcaggggaatgatgcctttggtgaaacgcagcgcggcaatgacaccgagcacgaccacggaaaggaaaatcactactgcgaatagcatagacggttttttctcatatgcccgtgtgtccgtcaatctctccggctggcatgaagccgtccttcccgtccagcagccgggtacgggtgcggacatcgttttttccttcttttcccgcccggaacgcttggaaaacggagggatggagcttatgtcggaatgatctgcagttccgggtgttcctctgggcgggcacaacattccggcatggattttcttcatgccggaggcgctggatttgggttgattttccggcgtttttcatgtaatggctgaccgcaatggtccatattcgggaatgcatgaggaggtggctgccgtttgtcataatggcggcctccctgggtgtgtctcccgcccaggatgtagcgagccccgatgccgcggatctggatttggacctggtcaaactgaaaagtggccccaagggcagacagagggaagccatgaggaaggtcctcctgcttgtgcatctgaagcaaaaggaaacgtggctggcggaatccacgggggatgaggccgtgcatctggcggcggagatttccttccgccggtatttggcttcagtggatatgggcggatgcccgggggaattcaagtgcgctttcctgcggtatgcaaagctcctgaattcctttgaagaaaaagatttgaatagtgtcgcggattttcctgcggtccctctgcaggctgccggaagagagctgttccgggtgctgcttacttaccgtctggagccggagcatctgctggaggaaatgaaagcgctggtggatgaggaaattgaggggaaggaggagctgtctgcaggacagatgatggatattgtccggggaatgcgggaagccctgcaatccggaagccgcccctttccagcggaaaggcctccggaagacagggtttccgggatgtagcggcttttcatggatggcatgccggtaccgtgaggaatcttgtggaggcatgccggaagtccgctccggctattccggaaggaaaatggattaagacggctgtacgtcagggtttccaggcggcggccatcagagtctggaaatggggcgggtccggctccctgtccacaatatccgtgtggatgttccggaatcccgcttccttcagcatgctttccagggcggcgggcgtgaagcccagccagcggtccgcgtaaagttcacgggcttcctcctgtccatgctggagcagatccagcaccaccaggcaaccgccggatttcaggatatcccacgcagcttccagcgctctggacggtttttgcgcatggtgcagggcctggctgagcagggccagatccaccgtgccgggtttaatgggcggcgcttcgatgtcgcccaggcggtattccagattgtccagcccgtgtttgcgcgccagctcctgccccagctccaccatgctgggggagttgtctacggcgatcacctgtttggcgctgggggagatgagctgggaaacgaaaccttccccggctcccaggtccgccactacgtcatagttcagaatgcggagcagtgctccggccagcgctttccaggaacggcctggcgcgtagttcttgcccagacggcacactacttcgtcaaaataggcctgggtgcggtttttgcgcttgtccaggataacctgaagggctttttggtccgtttccgcctccggcaattcctcgcaggctttcagggctacgttgtgcagatcgcctgccagggaaagagtgtaaaagacatttttgccggaacgggcgtcctccaccaccccttcctgccggagctgggccagctgggtggaaatgcggctttgccccatgccgagaatttcctgaagttccgcgacgctcagggattcttcattcagaacgttgatgatgcgcaggcgggtgggatctgccaggagtttgagcgtttttagggttgacttcatagcggaataatatatcaacacatcgagatttatcgatatgagtagaaacgcccctcacatctttacgtcggaatccgttggagaaggccatccggacaaggtggccgactacatttccgactctattttagacgcctgcctggctcaagacaaaactagccgcgttgcatgtgaaacgttggtgaagagcaatatggtcatcattgccggagagctgacgaccaaagcggtgatcgatccggaaaaaatcgcccgccaggccattcgggagatcgggtactgcaacaggcaggacgacgacgttttccatgcggataccgtctttttcacgaatctgctcacggaacagtccccggatattgcccagggggtggacgcccgggaggcggagggcaagggccatgcggagcagggcgccggagaccagggcattatgttcggcttcgcaacgaatgagacgccggagctgcttccggcccccatcgtgtttgcgcacaaactgctcattgagctggccaggaggcgcaaacgcgggcatgtggactggctgcgtccggactgcaagtcccaggtggctgtggcctatgacgaagacgggcgtcccgcgcatattgcaaacgtagttatttccacccagcacacggaagacgtggaccatgacacgatttactcatattgcgtcaaactcattaaaaatgtgcttcctgcggagcttctggatgagaggacggaatatttcatcaaccccaccgggaaattcgtcgtgggcggtccccacggggattcaggcctgacgggccgcaaaattattgtggacacgtacggcggcatggggcgccacggcggcggagccttttccggaaaagacccgtccaaggtggaccgttccgccgcgtatatgtgccgctgggttgccaagcacattgtggctgccggactggcggataaatgtgaattgcaggtggcttacgccatcggttaccccgctccggtttccatccgggtggatacgttcggtaccgggaaggtggaggaaatatccattgaaaatgcgctggaaaacatcttttccttcaagcctgcggatatggtggaacagctgaacctgcttcggcctatttaccggaagacgacgcactacgggcatttcaccaatccggagctgccctgggaacagctggacgaaacgcgcctggcctccctgaaacaacttcttcattaattcctacgacaacgcttacagacatgttttcagaaacggaacaatacaaggtgcgcgatatcggcctggcggatttcggacgcagggaactggatattgcggagcatgagatgcccggtctgatggccgtgcgtgaaaagtacgctgcagccaggcccctggagggcgtgcgcatcatgggctccctgcacatgacggtgcagacggccgtgctgatagaaacgctgacggctctgggcgcttccgtccgctgggcgagctgcaacattttctccacccaggaccacgccgccgccgccatcgccaaatccggcacccccgttttcgcctggaagggggaaacgctgcgggaatactgggactgcacgtggaaggccatgaactttccggacgggctggggccgcagctgattgtggacgacggcggagacgccaccctgcttatccaccgcgggtatgaaatggaggaaggctccgactgggtggataccccgtcggaatcggaagaagaggaagtcatcaaggctctgttgaaaaaaattgccgaggcgactccgggcatttttcatcgctggcttcccgagctgaaaggcgtttccgaggaaacgaccaccggcgtgcaccgcctgtaccagatgcaggcagccggccgtctgctgattccggccatcaacgtaaacgattccgtaaccaagtccaagtttgacaacctgtacggttgccgtgagtcccttgtggacggcatcaagcgcgccacggacgtgatggttgccggcaaagtggccgtcgtctgcggctacggggacgtaggcaaaggctgcgcccagtccctgcgcggcatgggagcccaggtggtcgtgacggaaatagaccccatctgcgctcttcaggcagccatggaaggttaccgcgtactgacggtggaagacacgctgggctgggcggatatttacgtgaccactacgggaaactgcaacatcatccgcatcgaacacatggaaaaaatgaaggaccaggccattgtctgcaacatcggccacttcgacaatgaaatccaggtacacaagctccagacgtatcccggcatcaggcatcttaacatcaaaccccaggtggaccgctacacgttcccgtccggcaacagcctgtatcttctggcggaaggccgcctggtcaacctgggctgcgctacgggtcatcccagcttcgtgatgtccaacagcttcgccaaccaggtgctggcccagctggaactgtggaatacccgtaaagaccgttccgtgggcgtggaagtgctgcccaaggtgctggatgaggaagtggcgcggctgcacctcgccaagatagggtgcaagctgactgtcctgcgtccggagcaggcggactacatcggcgttccggtggaaggtccttacaagccggacttttacaggtattaaccttgtcaaggttttcttttcccggccgttccgcgcaggcctgtccggcggaacggcttttttgttttcccgatgatggagggaagcaggataacggtacgtttattttttttcctgttttttatgcaggttccctgctgttagtgaaaaaaaggaagactttttatccggtctttaatgttcaaatacctttgcagcaggcaaaacgggagcaatcttggaatgctgaccagccagagcctcggcctgcattgcagaatgttccaaaaccatttgagtttggtaagaaggctgttatcgaatgaagcataggggaagagcaggagccttctctgttccgcctgaatcagactcatcaggcgatcggcggcctggtatgttatttccccggacttatgctttccgtatacctctttcatgatcattatccaggttgttatcaggaattccgatctcttgatcaggattgtcctggggttcccgctcttaaaattgcagatattactgttgtgtctccgatagtacgaacaccgtttgccggatgcgaccatgcctgattttttcaaataggcgcgcatggacagcattgtatcgtccgcaatgccgggccctgaaggcaaatattcgaagtcgctgaacaaagacctgtggtacatggcatttccgccaaaacagctgtaaacatgggaaatgtcaaaaatacattccctgtagggtttgacgacgacggaatctgaatctggcaacatgcgtccataagcgggttgtccatcttcatcgatttcattataagaatggcagtaaaccagatgaccgggatatttttccgccagagatgccaacgaggagatcctgtcttcccgtgcgatgtcatcgccgtcaaacttgataatccattccccccgggacaaatgaacggcacattgcaaattccctgcaattccccggttgctttcgttacggtggagaataatacgccgtccttctccctctttttccaccatttcttccaggcattcaaaagaaccgtcctgagaaaaatcgtccgaaataattatttcccattctcctggataatcctgttttaaaatagcccggaactgttccttgataaaacgtttctgattgtaacaaagaagaatggctgaaatcatgaaatcgaataaacagtttaagtttttttaaactgtctaaaaataacga

SEQ ID NO: 21 - DNA, 3937 bp, Akkermansia muciniphila
  source 1..3937: mol_type = genomic DNA
cgcactcaaaccacaatcatcacaccatgtataccaacgaacaaccaaacgacgacccctcgttgaacaggggttccgccaacaagatgaaccccagccccgccgccggacctcccggggcggccagccagcctggagagccgggcgccgcagcgcccctccatgccatgtccacccccatccagccctacggcacggataccgttatctatgaaaaatccgacaacttcgttcagacgtcagccggagccgatgtcttcatgccccccgtcaacgacaccttcagcgtcccggaaggaggggccacggtcgtggccagcctgacggtggacgactggggcaagctgaccatctccggcccgggcggcacgtttgagctggacctgacctccgccgccgatgaacccggaaaactgggaggccaccaggaatggtccaaatcaggctcctttgagttatccgaaggcacgtacactctctccatcacgcaccagaacatcgacatgccgcacaacgaatacaaccagtccgtgtgcagatactccgtgacggtgaccgcgcatggggactccagcagcagttcaagtagttcggacacccctccttcctccctgtcgagcagctcctcttcggacgtgccgccggaggaaaaggaaatctgctgccgttgcggtacgtgcacggacgcggaaggcaatgaatacaccattgcggcggaaaaactgccgggtgaccccggcgtggaaatctgcatgtcccaggccgaattcctggccaggggaggggcttcggcgccgtctcccgcggccttcagcctccgttccgcggaaaacgcccgtgaaacggcggaagcctgcggcggcctgaaatacgtgagcccgtgggcctggcgcgtccatctggacgaaacgtccggcctcatcaccgtggtgcctccggtgggcgccgcgctttacttcaacgtgcaggccggttcagatacggccctgcctgcgggcatctcccgcaagcgcgacttcagggtgcagctgctggatgaaactctggctcctgcctcttccggtgcccccgcctacctttccctggtggacgcggacgggcagaaaatccgcttctccgcggaaaccggcgctgtggtcggcatgacctccgcctccggcagggttcttctggcggaagactacttccggaatgtgagcaatacgtatgaccatgagggcagcctggtaagcagctacagcgccgcggaggggctgatgcgcacccggactggagcggacggagaactcgtcatggaatggtacgctcccgccgccgtcacggtcctggccgacggaacatacgaggtaacgggggaaccctataaaacctcctcctacctgtcctcggaagaaaacggcgtgcggaccaccgtcatcacgcgccagcagcgcggactgccggcccacaccatcacccgtacggaagaacccggcagagtcagcatcgccaaaggccagggggacgacaccatcatccgcaccattgaaaccaaccgcctctacggaggcctctcggaacgcattgaaaccgtcagaggcatcaacgacgccgagccggtcgcctgcaaccgcagcgtcaggcaatacacggacggcggctggctgctggtaagcgaaacggaagccttcaacacgccgctggcgcggacgacctcctacgaatacaacagccaataccgcgtctcccgcatcaaccgtccggacggcggctacacgcgctatgaatacgacggcgaaggacgggtcacgcttgaggcggcgccctgggccggcggcggagaacaggtaacccggaccgaatacgccggcctgcgcttctacgacaaccgtccggcgcgtgtcgccgaattccgggtgctgtccgacggcacggaaatcgaactgacggccgccgcttacgcctatgagcagtctcccctcatggaacgggtgaccaaaaccgtgactgccgccggttccggccaggaacagacaagcgtggaagaaacgtatggagaagccgccgcctatccctatgccgccgggcaaatcaaattcacccgggacattgccggcgtggaaaccttctatgactatgaggcggccgcggaacacggcgccgcgcacaaaaagacggctatcaccaaggtcggcggcgaactggcggccggacagagccgcaagacggaatcgttccttgccgccaacgacacggtgcttgttgaacaggaaagcgtctgggatggcgacaactggctgctgctctcaagcggcgcccatgaatacgacgaagaaggccgccgcacgaaaaccatccggggcaacggccgcgtcacctccacgtcctggatgtgctgcggcaagctctcggaaacggacgaagacggaatcctgacgtcgtacggctacaacagcgcccaccagctggtggaaaccatccgttcggaaatcagcgacggagacacggtcgtaaccccggaaaccatcaccacctacacccgggacgccgccgggcgcgtcctgcagacacgccgggacaggggagccatgaccacgacggaaagcgtggaatacgacaagctcggccgtatcgtcaggcaaaccgatgtgctgggtcgcgtgacggcgacagcctacagcgaaaacggcctgacggaaaccgtcacgacgcccgccggcgccaccctcgtcaccgaacgtcaccccgacggctccgtactccatgaatacggcacgggacagcgcgaacgctgccatgtctatgacatcgaccataactgcctgagggaaaccgttaccctggccggccagaccaccatcctctcccggaccctggtcaacggcttcggacaaagcgtcctgcaagtgacgcccacgactgccgggttcctgtatgaccgttccgaatacgatgaacaggggcatctcatccgcgcatggagggatgcgggagcgcaggagggggccgtcgccatggcgcctgcgctctatgaatacgatgctttcggcaacatgaccagggaaacgctcgccctggcggagcagcccgcaccggacaacagccccatccgggaatatgccttcagcgtggaaaacgcggaggacggcatctatatggtgacggcgcaaacccgctacaatgctgaggggcagccgcttgtctccgtacggaagcagctcctgtccgaactctccggagttctggaaacaaaagcggtcatcattgacgaacgcggcttgacttcggcagaatggacggagtatgctgaaaatacgaaaagaatccaaaagagcattgtcccctcttccagcgtcacggctcaaacggtggcggcggacggctttatgctctcgcagcagaaccacgcgggcatcacggagacggccgcccgcgcctatacggccgcaggcatgaccctgacccgcacggacggccgcggcaacacggtcacgatccggaccgacctggccggacgatccgtcagcgtgacggacgccgccggaaatgcgaccgtgacgcaatacgacgcctgccacgacctggctgccatggtgacggacgcgctgggaaatacggtatgcgccagatacgatgccagaggccggaaaacggccgaatgggggaccaggacgcagcccctgctcatgggttatgacgaggccgaccgcctggtgagcctgaccaccttccgcgcggcgcaggaaggagacgtcgcggaagaccccactggccgcgcggatggagacgtcaccacctggagctatgacgacgccacggggctggaaacgcgcaaaacgtatgccgacggaacgcacgtggacaaaacctgggacgccttcaacaggctcgccacggaaacgaacgcccgcggcatcgtgaagacctgcacttacgaacaggcccgcgggctgctgac

SEQ ID NO: 22 - DNA, 3662 bp, Akkermansia muciniphila
  source 1..3662: mol_type = genomic DNA
cgaattttcaatccgttatatacataaaaaattaacatctaatatttttgcaatgcgtctccatctgcctattaccctgctggcggctgttctggcttgttacaccagtgtttccctggccgtcccaacatctgaatcccccgcatggggagcgaactccacctttaataacaatgagcccgccaatgagtattcagttactgggaaccaatccgtcaaccttgatgtaaattcaggaaacaacaattattccacaggactttatatcggagcaggctcctcgtttaccattaatcagaatgtgaacggcgcctgtaccatcaatttgaacggggcatttgccggagaaggaaatttaatgctggtagcggctaacggcaatgccggctatgcctccaagtttgtgcttggttcccaggaaagcagtttttccgggaacattatcctttcccagaaggggacgcagcccggcggcgccattctccagattacgggaacggctctcgccaacgcaacggtagatttgtcaggctcaatcaatcaaagttccagcgccctgacgttgcaaatttccaatgccgcctctctggccggtttaaatgatgccgacggcttcaacggaacacataaggggcgcgtccagtcggctaattcctccagagcgaatcttaccctgacgggcaacggaaattacacgtatgggggaaatatcggggcaaccacgcagcattccggagtaaacggcaacactactcccacgggaggaataaatctgattatggccggaacaggcacgcaaaacctgacgggaaccgtcatcaacgcgaatattacgtcccaaggtggcgccttgaaaatcaacaattcttccctggcctattccggaataatcaccatggcgggaggaacgctggatttcacctccgccactctgggggcaaattccgttctgaacatgaacggcaccggcatattgaaaaacgcagcaattgacggagccaagctaacctatacggaatccggttcctcctttaccaaggaaaatgtaactttcacttcaggcaccattgacatcggcggcgcgcttgacagcctggtagagggagagcagggatacacgtttgatttagggaacaaccttggtacgaattttaccgtattgggcttagagacagggcaatatagaatagaaggcagcgtgctgacgataaaagacggggcgatatcccgtgtgacgtgggtatctgcgggagcgggaggggcattggaagaaacggtcaagaatgcctttacgctggctcttggggagggaagtgcggccaacgtcagcctgggctatctgaacggtacgctgacgacgagcggggacaaagtctatcaaatcaccaacaccggcggaaccaaaatcaacctgaacggggtatacaacagaggggcgacgctgccgtccagcaacctcaactaccggggggacatctggatggacatcaacggaggagcattcggcatcatctccggaggtgtcaccaatgaatggagcaccaaactccagaccagcacgctgactggggacacccatgtgcagctttccggaaacgccacggcggaacacgtcatcggcgggaacaacaagggagcgtctacaacattaacgggaaacaccaacgttaccgtcaaggataacgccatcgtggcgggagccatcatcggcgggagcacctccgcccacaacgccgtcaccaccatcacgggcaacacgagcgtgctggtaaccaatgtccaatattccaacacggcccagaacctggatgggggactctccaactcatacatcatcggaggaagctcctggtcaagcaataccacttccggaacaacgattcaaggcagcacgtcggctacaatcaacctgaacggaatcacgctttccggaacagaggaacacaacagcttcgtcaaaacaatcattggcggcagttatggcaatgtaaacaacgccggaacggtcaacaacatcaacggagacacctccgtttccatcatcggcagggaaggaatcaccttcacgggggacatcattgggggttcctttgaaaattcaggccaggcccaatacacgattggaggaaattcctccatctccattagcggaggctccaccttcaccggcaacatctacggtggctcctactccaaagtgccaggaaacacaggcagcaccatgaccactgcaggcaatatcacggtagaactcggaacaggcacctaccggggaaacatttatggagcaggaaataaaggcacggcaggaggcgacgtcctcgtctccctgacgggaggaagcgtcttcggggcggaaggacaagacggaggcatcaccgtcggcggaagcgccggagcggcggtcgaaggaaacaggacgctggagctcaagggaacctttggaaacggggacttccaaaacgtcaccttcacccggtttgatgaaatcaatatcgcgcaggaaggatcctcggccaccatctgggcgctgaccgacagcccgtccctgaccaaaacgggagcgggaaccctgacgctgggggcagacgcggcaggagcggaaaccatccttgacggaaccacggaaggaatcaccatcacggaaggcagcctgaacctctccggagccggcggcagccatatgaaaggaacgtggaacatcgcctccggctcccgcctcaccggagtcagcggaaccgtcaccgtgggtggggaaaacggtctggacagtctgtccattgccctgggaacggaaaacatcggccaggacacgcaggcgtctggcgccgtcatcagcaacggcagcggaacgggaagcgacccgaacctgtccatcgagggggaagggctgacgctggacctgagcaacgacgccgtcgtcaacctcctgctggaccacaaaaccgacgactcctccagctacctgaccctgaccagcggaacgctgaccgtcggcaacctgggcgacatcgccttcacgaccgaccttctgtccaactacggcatccgggtcaccggaacgaacggaggcagcctggtgctcagcggagcggccaccggcctctaccgcgtgcaggaggaaggaggaaacgcccatgaagtcaactcctatcaaacgctctccggctacgccggcgtcgtcatcggcggcggccagaccctgacggtcaacctggccggagccccgggcgaagccgacggacagggagctaaaatcaacaacctgatgggagccacgggcagcagcctggccgtcaacaacaccggagacggcacggccgtcgtcatcctcaacaacaaacaaatgacgacgggagaagacgacatcgacccggccggccaggacaccgtcatgggcggcagcatcacgggcggcagcaacgtcaccttcatcaaggaaggaaccgggacgctgacggtcggaggaacgatggacgtggaaaccctcgccctgcgagaaggaaacatcatcctcaacggcacggaaaactccctggacaccctcacgctggaaggaggaggcctgaccatcagcggcaacgccgaaatcgaaaccatcaccggcacggaagccggaggaaccctggccattcagggaactcttgacctgaccggaacaa

SEQ ID NO: 23 - DNA, 2095 bp, Akkermansia muciniphila
  source 1..2095: mol_type = genomic DNA
accagaaaattccggtggataaggcaggatgaatgtttgctcatcctcatataacaaatgttccttccggcttatgccggaaggaacatggtataaataacaaaaatattaatgaggaacaggatagggtacttttacttcataataattaacaagtttcccttcttcattaaatttaaattcaagaaattttaaccattcgtcaccaggatactccggatcgctcttgtcacaacgataacccaacctatctatgacgggaggattatttcttcctactatcccaactcctaaaatatctattacttcttgttgagttgttgtcccaataacaaaagacttggctattgttttcttttctttccaggaatattttttaagaggatattttttatataaatcttccggtgggcatctatataaactattcctgtttgttttaacggaatgattatttaaatcggattgatacaaatcaacatcttccgagcaggagcaaagcaatgcgctacatagaaaaacaacattttttgatatcatcatattttacggaattatttttttatcttgttgaaatagatcccttcggttcctgttcccattcattggcaaatagaatgcttattatgaaatttgtctagagttattatagaaaataaaaatagtgtcgcaagagtattctgcatcattccaatattttacaagttcccgttgaatgtttcccacacttttgatgaataataatcatcttcctttatgtcctgagtttttggggcattagaataaccatagactttcaaagcctttttacagaatgaacgaaagtttctatccatgtattgctaggtgaatgtctggggcgcgctcccctgcaggaacccggccgtggcaatgcggccgccttccctgtagccgaagtttactatgtttatttcaaaaaataaaaacctctcccaccactaggacaggagaggtttgaatttaattatttgttttatcaattcattaaaattttattaaaacacaaacaataaaagaagagacttgaacgaatattatacaacatcaaaaaaaccattcttttatttataaaattaattttgagccatcccaatatagatagcgcatagccacacgtataataaaataacaaaaattgacttaaatgataaattacctttcctgtaatttttatataaattctttatgtactcaataaatcctgcaaatccacttccaagaaggattgaacaaaaaatcacatatatgatatgctgcaaaaaatattcacccccgttccataatattatgacaataaaatcaattaaagaacatacaagtatttttaccaacgggaatttcccgatgtacacaagataaaatgtgaaccaaataaaatttgtcaataaagtcaaaacaataaacaatatttctttcatcattctttatactttctatatgttccagaaatatttcctctcacgttaaaaggagcagcataaccgtatttttctaaggcggcaaaacgcgtttgcagccaactattatgatcgaaatcataaatatcgctaatatatgcagtataatctacggaacaatctgaatttactgtagcagtcatcgtcatgtaatatcttcctaaaatataatttccttcactggatcttgtttgaagaagttgccaggaatccagatataattttttctcaaaacatttatgttctatcgcatacgatatagccaatcttgccaataaattaatattatcttggagaccatctgattcgccactctcgagatctataatatattgaggatctattttatactcgccacctgtctttgaaagatatttaatgaacatttcatacgccaaagaagaatcaacccttgttcctattaaagcagcatagacctccggatatccaagagtgatattccctattctccaaaaatcaatactatacttatatttaggaagatcaggatgcggatcaggagctatcttttttgccccccatgaaattagcccaacataatcttttaaaaagataggttgatttttaacatatgcgaacaaattccaaccgccctg

SEQ ID NO: 24 - DNA, 816 bp, Akkermansia muciniphila
  source 1..816: mol_type = genomic DNA
agcctggcaaggcccgtcacgcggcgcacggcccgccaggggaataccgtcaacgacagctttgcctgcaacagccggagcgaactgaccgccgccaccgtcagcggcaagacatacggctacagttacgacaacatcggcaaccggaaaaccgcgagggaagacgcggaagaagcgaccgcctacacaaccggcccgctcaaccaatacaccgccatcgagcgcggagaagaagccgcctttgaaccggttcacgacgcggacggcaatcagacattgatcaggacatccaccggcatctggcaagtcgcctacaacgcggaaaaccgcccggtgcgcttcgtcaatgaaagcgccaaaaccgtggtggaatgcacctacgactacatgggcaggcggcacacccgcaaagtgagcgtcaacgggacggtgagcagctacctgcgctacatgtaccgtggctacctgcaaatagccgccatagatgccgtcagcggagtcttccgatggttcctgttctgggacccgacgcagcctgaggctgcgcgcccgctggccatccgcaaagacggcacctggtacgcctacgggtgggatctgaccaggaacgtcacggaaatcttcgggaaagccggttacctgcggacggtctacacctacacgccttacggagaagccaccgccgaaggggacgtcacccagcccatccagtggagcagcgaatacaacgatgaagaactggggcttgtctactacaactaccgtcatctcaatccgcacgacggaaggtggatcagccgcgatcccatcgaggaa

SEQ ID NO: 25 - DNA, 763 bp, Akkermansia muciniphila
  source 1..763: mol_type = genomic DNA
ctgtgccgtcccaagcgcgttgaccgtgctcccagccgccgccgccatggcgcgggaggctccggagaggttgccgtcattgatcatggtgctgacgccgttcatgaattgggccagctgggagtcggggtccaggtttttgcgggcttcccagagcaggccggctccggcggcggagttccacgtgtcggccgcggaggcgaagaggttttcctgccggagtgtggcattgagcaggatgtcgtttccgtcgcggctcagtgtggcgtcctggtagtagacggcgaagaggccggatatccgggcggcgaggctctgcccgtcttccaggccgctgatgctgccggtagcgctcatcaggacgacgtcatggaggtcgctccccgcgttcatggcggcgtttcctttcatgttggagaggaggaagccggctccgtcctgcacggtgatggtgcccgccgtcagcatgggggcgccaaagggggcgtcctggttgaagttgtagatcagttccgtcgtggagccgttctggaaggtgatgttttccacgttgagcgtggtgttggcgctgccctgggcgtccccggtggcttcaatacgcagggtgccgttgtttccggcggtgatgctgttgtagttcagcgtgggggcgtccgcggtgcctttcaggaccaggacgcctccgtcacggacggcgaggtcgtagtccttattgccggtttgcaggtattgggtggcttgcccggagatgtccagggtgccg

SEQ ID NO: 26 - DNA, 731 bp, Akkermansia muciniphila
  source 1..731: mol_type = genomic DNA
ggagtcgtaggcgcattccacggttgtcccgccgtcttcgctttcaaatttcacgggccggttttccgcgttgtaggtgactgtccagatgccggtggaagttttcaccagcgtctggttgccgtcggcgtcgtattgaggtgtaaaggcttccccgccatttctgacgatgcccgcgtaccggttgagttcgtcggtttcatagtccgtggtgctgccgaattcgaaggcttccttccggttgccgatgttgtcgtactgatagccgaagcggccgccgggcctgagctggtctccgaccagttcgccgcggctgttgtaggtgaacaaacgcgtcgttttgggcgccgccgtgttccacgtgtccctgcgccgtgtaggacggcccagcgcgtcgtagtcgtattcgtgccttgccggcgggttggcgcttccgggcctccggtagtcgatgacggagaggaggtcgcggctgtcttcataggtgttgacccgggtcatgccgttggggtaggcgagttgttccacaagccctccctgttcgcagtaagtccaggagaagggcgtttccatgccttccgctgtgagggtggagaggcggcctttgccgtcataggacaggtgcgtctgctggacgcggcggccgtccgcgcttaattcgtaccccgcctgacggccgagcccgtcatagcgctcggagacctgccaggcgatgccgtttgccgcaaggc

SEQ ID NO: 27 - DNA, 477 bp, Akkermansia muciniphila
  source 1..477: mol_type = genomic DNA
ccgctaccaggacaggcgctgggcgcacacgctcatcctgacgggagggtggaacgacgcgaaactcaaccgtacggtcaactatggggaaggaagctacgggacgcagggaagcaccagcgggtggggctttggagcgatgtatgaactcacctacgacgtatacctcaacgaaaaccgcagcagcgtgctgcagccgctgttcaacgcctcggtggtgacgacgcggatggacggctatgaggaaacgggtgcgggcaacgcgggcctgaacgtcggcagacaggactggacgacggggacgctggcgctgggcggccggtggatgggcctggtaggcagcaacatcttcggacgagaagcgctggcggaaatccgggtcaacgcggcgcaggacctgggagaccggagaggggaaacgaacgtctccctgctgggcaacccaggctttgcgcaaagcgtgaggggagcgaaaac

SEQ ID NO: 28 - DNA, 447 bp, Akkermansia muciniphila
  source 1..447: mol_type = genomic DNA
atgggcaggagattcgagaaaaaagtgacggtcggagggacaacgggcttccacgcgcgctacctctaccgggactacctgcaggtggcggagtgcgacttgaccggggaaacgccgaagcttgtgcgcagctacctctgggacccctcggaacctgaggccacgcgcgtcctggccatgacgcgctgggaggcgaacgggacgcaggtgaaggagcatctctactgcatgcacgacgcgatgaagaacgtcacttccctcttcggggaggcgcgcggacgccgcgccctgtacgaataccgttcgtacggagggctggtcacgtcggaaggcaacatggcgcaagagaacaaattccgcttctcttgcgaatacatggacgacgagctcggcctcatctactacaactaccgtcatctcaatccgcgcgacggcaggtggatcagc

SEQ ID NO: 29 - DNA, 338 bp, Akkermansia muciniphila
  source 1..338: mol_type = genomic DNA
gtcgtaagcgtattccctttccacaactcttgtggcgccgcgtttgtagaccatggtagtgaccagatcccgcttttcctcatagccccattccagcgtcatgccgttgggcatggccatcacggagggcaggccgcttccttccatgtattgccaggtgaaggtctggggcgcgctgccctgcaggaacccggccgtggcaatgcggccgtcttccccgtagctgatgcttacggtgtgctgcgctgtgccgctccgcgcgtagatgtagcctgtgctgcgcccgaaggcgtcttttttctcggtgatgaggtgggtgtggttgcccactcgcaggt

SEQ ID NO: 30 - DNA, 270 bp, Akkermansia muciniphila
  source 1..270: mol_type = genomic DNA
tcgattggggaattccaaatccgctgtaattaaaaagagattgcgtgcggttgtttctgcatgacaggagagcctcttcgtagaaaggaaataaaactgatgatcaataattttctttgaaatacggactttccggcaggtatggatgtttctgccggaatgggaattgatggggttacccggatggaatcatgaagacggaagattccggtcattggggaagcttattttcagaagttcctttctttcaaaatttaaccttgactccgg

SEQ ID NO: 31 - DNA, 256 bp, Akkermansia muciniphila
  source 1..256: mol_type = genomic DNA
ctgcctgccagcgtgccggagaaggttccggaggaggttgtcgccgaggagatggagaggctgcctccgttcatggacagggcgccgcttccggagaggccgctgatggcgccggattccgttccggtgagggtcagcgtgccgtcggcggtgactgaggttccgtccagccgggcttctccgcccagggccagttccgctccttcccggatgcggagggagccggttccggtgatggctccgttgttgatgctgc

SEQ ID NO: 32 - DNA, 200 bp, Akkermansia muciniphila
  source 1..200: mol_type = genomic DNA
gcgatgattccaatattggcccatgcaatataaaatttgatattttatattcaaaatgaaagtcttatagtatgcctccccttgcttcaaggggggaggtaaatgaaaaggtgaaaatcccattttagaaatttaaaaaatcataatgcacttacagtaaaagtatgagaatccgggaactggtattttcaacttgacat

SEQ ID NO: 33 - DNA, 155 bp, Akkermansia muciniphila
  source 1..155: mol_type = genomic DNA
gttttctttcttgttagaagtcgtagcggtagccgacgcttccgttcagcgcgctggacccgtcacggatgtccgcgttcccgttcacgtagatggttcccttcgttcctacaggcacgctcagtccggctcccagctgcagcgccgtcgttccc

SEQ ID NO: 34 - DNA, 134 bp, Akkermansia muciniphila
  source 1..134: mol_type = genomic DNA
tgtcggtttccagttctccgtagggattgcaggcgaaggttcgcgttccggcagcatcagtgatttgcgtcaattgaccgaggtgatcgtagacgaagctctggccgggcgtggcgtctgagtagctgattccc

SEQ ID NO: 35 - DNA, 112 bp, Akkermansia muciniphila
  source 1..112: mol_type = genomic DNA
gcctaccgtgcctccccaggtggtgagctggtagccgctttcatccccgcgggtgtcgagtttggcgtaggagcccgtgccttccatccacatgtggaagcgggggaggtcg
